(19) United States
(12) Patent Application Publication
(10) Pub. No.: US 2010/0273854 A1
(43) Pub. Date: Oct. 28, 2010

(54) COMPOSITIONS AND METHODS FOR INHIBITING NADPH OXIDASE EXPRESSION

(76) Inventors: Hagar Kalinski, Rishon-le-Zion (IL); Igor Mett, Rehovot (IL); Elena Feinstein, Rehovot (IL)

Correspondence Address: COOPER & DUNHAM, LLP, 30 Rockefeller Plaza, 20th Floor, NEW YORK, NY, 10112, US

(21) Appl. No.: 12/452,123

(22) PCT Filed: Jun. 12, 2008
(86) PCT No.: PCT/IL2008/000797

§ 371 Date: Jun. 14, 2010

Related U.S. Application Data
(60) Provisional application No. 60/934,865, filed on Jun. 15, 2007.

(51) Int. Cl. A61K 31/713; C07H 21/02; A61P 27/16; A61P 13/12; A61P 27/02; A61P 11/00; A61P 17/02; A61P 25/00

(52) U.S. Cl. 514/44 A; 536/24.5

(57) ABSTRACT

One or more inhibitors, in particular siRNAs, which down-regulate the expression of a NOX gene selected from the group consisting of NOX4, NOXI, NOX2 (gp91phox, CYBB), NOX5, DUOX2, NOXOI, NOXAI and NOXA2 (p67phox) is disclosed. Also provided is a vector capable of expressing the compound A method is provided for treating or preventing the incidence or seventy of various diseases or conditions associated with NOX gene compπsing administering to the patient the inhibitor in a pharmaceutical composition

[0001] This application claims the benefit of U.S. provisional application No. 60/934,865 filed Jun. 15, 2007, which is hereby incorporated by reference in its entirety.

[0002] Throughout this application various patent and scientific publications are cited. The disclosures for these publications in their entireties are hereby incorporated by reference into this application to more fully describe the state of the art to which this invention pertains.

### FIELD OF THE INVENTION

[0003] The present invention relates to compounds, pharmaceutical compositions comprising same and methods of use thereof for the inhibition of NADPH oxidase genes, including NOX4, useful in the treatment of diseases and disorders in which expression of Nox4 and other NADPH oxidase genes is adverse. In particular embodiments, the invention provides siRNA oligonucleotides, compositions comprising same and methods of use thereof in the treatment of acute renal failure, hearing, loss, acute respiratory distress syndrome and glaucoma.

### BACKGROUND OF THE INVENTION

### siRNAs and RNA Interference

[0004] RNA interference (RNAi) is a phenomenon involving double-stranded (ds) RNA-dependent gene specific posttranscriptional silencing. Originally, attempts to study this phenomenon and to manipulate mammalian cells experimentally were frustrated by an active, non-specific antiviral defense mechanism which was activated in response to long dsRNA molecules (Gil et al. Apoptosis, 2000. 5:107-114). Later it was discovered that synthetic duplexes of 21 nucleotide RNAs could mediate gene specific RNAi in mammalian cells, without the stimulation of the generic antiviral defense mechanisms (see Elbashir et al. Nature 2001, 411:494-498 and Caplen et al. PNAS USA 2001, 98:9742-9747). As a result, small interfering RNAs (siRNAs), which are short double-stranded RNAs, have become powerful tools in attempting to understand gene function. Thus RNA interference (RNAi) refers to the process of sequence-specific post-transcriptional gene silencing in mammals mediated by small interfering RNAs (siRNAs) (Fire et al, Nature 1998. 391, 806) or microRNAs (miRNA; Ambros, Nature 2004 431:7006, 350-55; and Bartel, Cell. 2004. 116(2):281-97). The corresponding process in plants is commonly referred to as specific post transcriptional gene silencing or RNA silencing and is referred to as quelling in fungi.

[0005] An siRNA is a double-stranded RNA molecule which inhibits, either partially or fully, the expression of a gene/mRNA of its endogenous or cellular counterpart, or of an exogenous gene such as a viral nucleic acid. The mechanism of RNA interference is detailed infra.

[0006] Several studies have revealed that siRNA therapeutics are effective in vivo in both mammals and in humans. Bitko et al., have shown that specific siRNA molecules directed against the respiratory syncytial virus (RSV) nucleocapsid N gene are effective in treating mice when administered intranasally (Bitko et al., Nat. Med. 2005, 11(1):50-55). siRNA has recently been successfully used for inhibition in primates (Tolentino et al., Retina 2004. 24(1):132-138). For a review of the use of siRNA as therapeutics, see Barik (J. Mol. Med. 2005. 83: 764-773). In addition clinical studies with short siRNAs that target the VEGFR1 receptor for the treatment of Age-Related Macular Degeneration (AMD) have been conducted in human patients. In those studies, such siRNA administered by an intravitreal (intraocular) injection was found effective and safe in 14 patients tested (Kaiser, Am. J Opthalmol. 2006.142(4):660-8).

siRNA Structures

[0007] The selection and synthesis of siRNA corresponding to known genes has been widely reported; (see for example Ui-Tei et al., J Biomed Biotech. 2006; 2006: 65052; Chalk et al., BBRC. 2004, 319(1): 264-74; Sioud & Leirdal, Met. Mol. Biol.; 2004, 252:457-69; Levenkova et al., Bioinform. 2004, 20(3):430-2; Ui-Tei et al., NAR. 2004, 32(3):936-48).

[0008] For examples of the use of, and production of, modified siRNA see, for example, Braasch et al., Biochem. 2003, 42(26):7967-75; Chiu et al., RNA, 2003, 9(9):1034-48; PCT publications WO 2004/015107 (atugen AG) and WO 02/44321 (Tuschl et al). U.S. Pat. Nos. 5,898,031 and 6,107,094, teach chemically modified oligomers. US Patent Publication Nos. 2005/0080246 and 2005/0042647 relate to oligomeric compounds having an alternating motif and dsRNA compounds having chemically modified internucleoside linkages, respectively.

[0009] Other modifications have been disclosed. The inclusion of a 5′-phosphate moiety was shown to enhance activity of siRNAs in Drosophila embryos (Boutla, et al., Curr. Biol. 2001, 11:1776-1780) and is required for siRNA function in human HeLa cells (Schwarz et al., Mol. Cell, 2002, 10:537-48). Amarzguioui et al., (NAR, 2003, 31(2):589-95) showed that siRNA activity depended on the positioning of the 2′-O-methyl modifications. Holen et al (NAR. 2003, 31(9):2401-07) report that an siRNA having small numbers of 2′-O-methyl modified nucleosides gave good activity compared to wild type but that the activity decreased as the numbers of 2′-O-methyl modified nucleosides was increased. Chiu and Rana (RNA. 2003, 9:1034-48) teach that incorporation of 2′-O-methyl modified nucleosides in the sense or antisense strand (fully modified strands) severely reduced siRNA activity relative to unmodified siRNA. The placement of a 2′-O-methyl group at the 5′-terminus on the antisense strand was reported to severely limit activity whereas placement at the 3′-terminus of the antisense and at both termini of the sense strand was tolerated (Czauderna et al., NAR. 2003, 31(11):2705-16; WO 2004/015107). The molecules of the present invention offer an advantage in that they are non-toxic and may be formulated as pharmaceutical compositions for treatment of various diseases.

### NADPH Oxidase

[0010] The NADPH oxidase (NOX) family of proteins in humans consists of at least thirteen unique gene products: NOX1, NOX2 (gp91phox, CYBB), NOX3, NOX4, NOX5, DUOX1 and DUOX2 and associated proteins p22phox (CYBA), NOXO1, NOXO2 (p47phox, NCF1) NOXA1, NOXA2 (p67phox, NCF2) and p40phox (NCF4) (hereinafter “NOX genes”). Each member of the NOX family has a specific tissue expression pattern. For example, NOX1 is highly expressed in colonic epithelium, NOX2 has a broad expression pattern while NOX4 has been detected primarily in renal tubular epithelium (Geiszt et al., PNAS USA 2000, 97:8010-8014) and proliferating vascular smooth muscle (Lassegue et al., Circ Res. 2001 88(9):888-94). Reactive oxygen species (ROS) generated in many tissues has been shown to originate from the activity of NOX enzymes and NOX gene expression has been associated with various pathological processes (comprehensive review in Bedard and Krause, Physiol. Rev. 2007. 87:245-313, hereby incorporated by reference in its entirety).

[0011] International patent publication no. WO 2005/119251 discloses a method of inhibiting NOX3 for treating hearing loss.

[0012] International patent publication no. WO 2002/030453 discloses NADPH oxidase inhibitors for reducing angiogenesis.

[0013] U.S. Pat. No. 6,846,672 and related patents and patent applications disclose the polynucleotide and polypeptide sequences of the NOX enzymes.

[0014] US Patent Publication No. 2007/0037883 relates to NOX4 inhibition.

[0015] U.S. Pat. Nos. 6,846,672; 7,029,673; 7,202,052; 7,202,053 and 7,226,769 disclose NOX enzymes and regulators thereof.

[0016] International patent publication no. WO 2008/050329 assigned to the assignee of the current invention relates to certain NOX genes.

### Chemical-Induced Toxicity

[0017] Certain chemicals, including pharmaceuticals, are known to be toxic to their hosts and a benefit-risk assessment may be warranted. Chemicals such as cisplatin and its analogs (cisplatin-like compounds) and hydroquinone and its analogs, selected antibiotics and loop diuretics are known to be associated with, inter alfa, hearing loss (ototoxicity), renal damage (nephrotoxicity) and/or neural damage (neurotoxicity).

[0018] The ototoxic effects of various therapeutic drugs on auditory cells and spiral ganglion neurons are often the limiting factor for their therapeutic usefulness. Main ototoxic drugs include the widely used chemotherapeutic agent cisplatin and its analogs, commonly used aminoglycoside antibiotics, e.g. gentamycin, for the treatment of infections caused by gram-negative bacteria, quinine and its analogs, salicylate and its analogs, and loop-diuretics.

[0019] For example, antibacterial aminoglycosides such as gentamycins, streptomycins, kanamycins, tobramycins, and the like are known to have serious toxicity, particularly ototoxicity and nephrotoxicity, which reduce the value of such antimicrobials as therapeutic agents (see Goodman and Gilman's The Pharmacological Basis of Therapeutics, 6th ed., A. Goodman Gilman et al., eds; Macmillan Publishing Co., Inc., New York, 1980, pp. 1169-71).

[0020] Chemical induced toxicity especially ototoxicity is a dose-limiting side-effect of antibiotic administration. Chemical induced toxicity, especially ototoxicity, is also a serious dose-limiting side-effect for cisplatin and cisplatin-like compounds, which contain a platinum coordination complex, that have proven effective on a variety of human cancers including testicular, ovarian, bladder, and head and neck cancer. Platinum based drugs include carboplatin, cisplatin, oxaliplatin and satrapaltin inter alfa; see Kelland and Farrell, Platinum-based drugs in cancer therapy (Cancer drug discovery & development) Lavoisier 2000 which is hereby incorporated by reference.

[0021] Cisplatin (Platinol®) and cisplatin-like compounds (platinum based compounds) damage auditory and vestibular systems.

[0022] Salicylates, such as aspirin, are the most commonly used therapeutic drugs for their anti-inflammatory, analgesic, anti-pyretic and anti-thrombotic effects. Unfortunately, they too have ototoxic side effects and can lead to tinnitus (“ringing in the ears”) and temporary hearing loss. Moreover, if the drug is used at high doses for a prolonged time, chronic and irreversible hearing impairment can arise.

[0023] Without being bound by theory, it is believed that cisplatin drugs (cisplatin and cisplatin-like compounds) and other potentially ototoxic drugs (such as aminoglycoside antibiotics) may induce the ototoxic effects via programmed cell death or apoptosis in inner ear tissue, particularly inner ear hair cells (Zhang et al., Neuroscience 2003, 120(1):191-205; Wang et al., J. Neuroscience 2003, 23(24):8596-8607). Presbycusis, age related hearing loss, is prevalent in the aging population with about 30-35 percent of adults between the ages of 65 and 75 years and about 40-50 percent of people aged 75 and older affected.

[0024] In mammals, auditory hair cells are produced only during embryonic development and do not regenerate if lost during postnatal life, therefore, loss of hair cells results in profound and irreversible deafness. Unfortunately, at present, there are no effective therapies to treat the cochlea and reverse this condition. Thus, an effective therapy to prevent cell death of auditory hair cells would be of great therapeutic value.

[0025] Accordingly, there exists a need for means to prevent, reduce or treat the incidence and/or severity of inner ear disorders and hearing impairments involving inner ear tissue, particularly inner ear hair cells and of other diseases or disorders caused by toxicity such as renal damage (nephrotoxicity) and/or neural damage (neurotoxicity).

### Acute Renal Failure

[0026] Acute renal failure (ARF) is a clinical syndrome characterized by rapid deterioration of renal function that occurs within days. The principal feature of ARF is an abrupt decline in glomerular filtration rate (GFR), resulting in the retention of nitrogenous wastes (urea, creatinine). Worldwide, severe ARF occurs in about 170-200 per million population annually. To date, there is no specific treatment for established ARF. Several drugs have been found to ameliorate toxic and ischemic experimental ARF, as manifested by lower serum creatinine levels, reduced histological damage and faster recovery of renal function in different animal models. These include anti-oxidants, calcium channel blockers, diuretics, vasoactive substances, growth factors, anti-inflammatory agents and more. However, the drugs tested in clinical trials showed no benefit, and their use in clinical ARF has not been approved.

[0027] In the majority of hospitalized ARF patients, ARF is caused by acute tubular necrosis (ATN), which results from ischemic and/or nephrotoxic insults. Renal hypoperfusion is caused by hypovolemic, cardiogenic and septic shock, by administration of vasoconstrictive drugs or renovascular injury. Nephrotoxins include exogenous toxins such as contrast media, aminoglycosides and cisplatin and cisplatin-like compounds as well as endogenous toxin such as myoglobin. Recent studies, however, support the theory that apoptosis in renal tissues is prominent in most human cases of ARF. The principal site of apoptotic cell death is the distal nephron. During the initial phase of ischemic injury, loss of integrity of the actin cytoskeleton leads to flattening of the epithelium, with loss of the brush border, loss of focal cell contacts, and subsequent disengagement of the cell from the underlying substratum. It has been suggested that apoptotic tubule cell death may be more predictive of functional changes than necrotic cell death (Komarov et al., Science 1999, 10; 285(5434):1733-7); Supavekin et al., Kidney Int. 2003, 63(5):1714-24).

[0028] In conclusion, currently there are no satisfactory modes of therapy for the prevention and/or treatment of acute renal failure, and there is a need therefore to develop novel compounds for this purpose.

### Glaucoma

[0029] Glaucoma is one of the leading causes of blindness in the world. It affects approximately 66.8 million people worldwide and at least 12,000 Americans are blinded by this disease each year (Kahn and Milton, Am J Epidemiol. 1980, 111(6):769-76). Glaucoma is characterized by the degeneration of axons in the optic nerve head, primarily due to elevated intraocular pressure (IOP). One of the most common forms of glaucoma, known as primary open-angle glaucoma (POAG), results from the increased resistance of aqueous humor outflow in the trabecular meshwork (TM), causing IOP elevation and eventual optic nerve damage.

### Acute Respiratory Distress Syndrome

[0030] Acute respiratory distress syndrome (ARDS), also known as respiratory distress syndrome (RDS) or adult respiratory distress syndrome (in contrast with infant respiratory distress syndrome, IRDS) is a serious reaction to various forms of injuries to the lung. This is the most important disorder resulting in increased permeability pulmonary edema.

[0031] ARDS is a severe lung disease caused by a variety of direct and indirect insults. It is characterized by inflammation of the lung parenchyma leading to impaired gas exchange with concomitant systemic release of inflammatory mediators causing inflammation, hypoxemia and frequently resulting in multiple organ failure. This condition is life threatening, usually requiring mechanical ventilation and admission to an intensive care unit. A less severe form is called acute lung injury (ALI).

### Spinal Cord Injury

[0032] Spinal cord injury or myelopathy, is a disturbance of the spinal cord that results in loss of sensation and/or mobility. The two common types of spinal cord injury are due to trauma and disease. Traumatic injury can be due to automobile accidents, falls, gunshot, diving accidents inter alia, and diseases which can affect the spinal cord include polio, spina bifida, tumors and Friedreich's ataxia.

### Ischemia Reperfusion Injury Following Lung Transplantation

[0033] Lung transplantation, the only definitive therapy for many patients with end stage lung disease, has poor survival rates in all solid allograft recipients. Ischemia reperfusion (IR) injury is one of the leading causes of death in lung allograft recipients.

[0034] International patent application no. WO 2006/035434 assigned to the assignee of the present invention discloses p53 inhibitors for the treatment of, inter alia, acute renal failure and hearing loss.

### Oral Mucositis

[0035] Oral mucositis, also referred to as a stomatitis, is a common and debilitating side effect of chemotherapy and radiotherapy regimens, which manifests itself as erythema and painful ulcerative lesions of the mouth and throat. Routine activities such as eating, drinking, swallowing, and talking may be difficult or impossible for subjects with severe oral mucositis. Palliative therapy includes administration of analgesics and topical rinses.

### Dry-Eye Syndrome

[0036] Dry eye syndrome is a common problem usually resulting from a decrease in the production of tear film that lubricates the eyes. Most patients with dry eye experience discomfort, and no vision loss; although in severe cases, the cornea may become damaged or infected. Wetting drops (artificial tears) may be used for treatment while lubricating ointments may help more severe cases.

### Ocular Ischemic Conditions

[0037] Ischemic optic neuropathy (ION) includes a variety of disorders that produce ischemia to the optic nerve. By definition, ION is termed anterior if disc edema is present acutely, suggesting infarction of the portion of the optic nerve closest to the globe. ION also may be posterior, lying several centimeters behind the globe. Ischemic optic neuropathy usually occurs only in people older than 60 years of age. Most cases are nonarteritic and attributed to the effects of atherosclerosis, diabetes, or hypertension on optic nerve perfusion. Temporal arteritis causes about 5% of cases (arteritic ION).

[0038] Symptoms and signs are sudden, partial or complete vision loss, accompanied by swelling of the optic nerve head and often hemorrhage. Visual field defects may manifest as loss of half the visual field with a horizontal demarcation or as central or centrocecal (surrounding the natural blind spot) scotomata. Decreased vision is soon followed by pallor of the optic disk.

[0039] More effective therapies to treat the above mentioned diseases and disorders would be of great therapeutic value.

### SUMMARY OF THE INVENTION

[0040] The present invention provides novel double stranded oligonucleotides that inhibit or reduce expression of NOX4, NOX1, NOX2 (gp91phox, CYBB), NOX5, DUOX2, NOXO1, NOXO2 (NCF1), NOXA1 and NOXA2 (p67phox, NCF2 (the “NOX genes”) and pharmaceutical compositions comprising one or more such oligonucleotides or a vector capable of expressing the oligoribonucleotide. The present invention further relates to methods for treating or preventing the incidence or severity of various diseases or conditions in which NOX genes expression is associated with the etiology or progression of the disease or condition.

[0041] In one aspect the present invention provides a compound having the structure:

| | |
|---|---|
| 5′ (N)ₓ-Z | 3′ (antisense strand) |
| 3′ Z′-(N′)_{y} | 5′ (sense strand) |

wherein each of N and N′ is a nucleotide selected from an unmodified ribonucleotide, a modified ribonucleotide, an unmodified deoxyribonucleotide and a modified deoxyribonucleotide;
wherein each of (N)ₓ and (N′)_{y} is an oligonucleotide in which each consecutive N or N′ is joined to the next N or N′ by a covalent bond;
wherein each of x and y is an integer between 18 and 40;
wherein each of Z and Z′ may be present or absent, but if present is dTdT and is covalently attached at the 3′ terminus of the strand in which it is present; and
wherein the sequence of (N)ₓ comprises an antisense sequence to the mRNA transcribed from a mammalian gene selected from the group consisting of NOX4, NOX1, NOX2 (gp91phox, CYBB), NOX5, DUOX2, NOXO1, NOXO2 (NCF1), NOXA1 and NOXA2 (p67phox, NCF2).

[0042] In certain embodiments the preferred gene is NOX4. The polynucleotide sequence of human NOX4 mRNA (NCBI gene ID no. 50507) is set forth in SEQ ID NO:1, and the corresponding polypeptide is set forth in SEQ ID NO:2.

[0043] In some embodiments the compound comprises a phosphodiester bond. In various embodiments the compound comprises ribonucleotides wherein x=y and wherein x is an integer selected from the group consisting of 19 and 21. In preferred embodiments x=y=19.

[0044] In some embodiments the compound is blunt ended, for example wherein Z and Z′ are both absent. In an alternative embodiment, the compound comprises at least one 3′ overhang, wherein at least one of Z or Z′ is present.

[0045] In some embodiments the compound comprises one or more ribonucleotides unmodified in their sugar residues. In other embodiments the compound comprises at least one ribonucleotide modified in the sugar residue. In some embodiments the compound comprises a modification at the 2′ position of the sugar residue. Modifications in the 2′ position of the sugar residue include amino, fluoro, methoxy, alkoxy and alkyl moieties. In certain preferred embodiments the modification comprises a ribonucleotide comprising a methoxy moiety at the 2′ position (2′-O-methyl; 2′-O-Me; 2′-O—CH₃) of the sugar residue.

[0046] In some embodiments the compound comprises modified alternating ribonucleotides in one or both of the antisense and the sense strands. In preferred embodiments the compound comprises modified alternating ribonucleotides in the antisense and the sense strands. In some preferred embodiments the middle ribonucleotide of the antisense strand is not modified; e.g. ribonucleotide in position 10 in a 19-mer strand.

[0047] In additional embodiments the compound comprises modified ribonucleotides in alternating positions wherein the ribonucleotides at the 5′ and 3′ termini of the antisense strand are modified in their sugar residues, and the ribonucleotides at the 5′ and 3′ termini of the sense strand are unmodified in their sugar residues. In some embodiments, neither the antisense nor the sense strands are phosphorylated at the 3′ and 5′ termini. In other embodiments either or both the antisense and the sense strands are phosphorylated at the 3′ termini.

[0048] In various embodiments the compound comprises an antisense sequence present in Tables A-R. In other embodiments the present invention provides a mammalian expression vector comprising an antisense sequence present in Tables A-R. In certain preferred embodiments the present invention provides a compound having the structure

| | |
|---|---|
| 5′ (N) | 3′ antisense strand |
| 3′ (N′) | 5′ sense strand |

wherein each of N and N′=19 and are fully complementary;
wherein alternating ribonucleotides in the antisense and the sense strands are modified to result in a 2′-O-methyl modification in the sugar residue of the ribonucleotides;
wherein the ribonucleotides at the 5′ and 3′ termini of the antisense strand are modified;
wherein the ribonucleotides at the 5′ and 3′ termini of the sense strand are unmodified;
wherein the antisense and the sense strands are phosphorylated or non-phosphorylated at the 3′ and 5′ termini; and
wherein each of N and N′ is selected from the group of oligomers set forth in Tables A-R.

[0049] In a second aspect the present invention provides a pharmaceutical composition comprising one or more compounds of the present invention, in an amount effective to inhibit human NOX gene expression wherein the NOX gene or NOX associated gene is selected from NOX4, NOX1, NOX2 (gp91phox, CYBB), NOX5, DUOX2, NOXO1, NOXO2, NOXA1 and NOXA2 (p67phox); and a pharmaceutically acceptable carrier.

[0050] In another aspect, the present invention relates to a method for the treatment of a subject in need of treatment for a disease or disorder associated with the expression of a NOX gene wherein the NOX gene is selected from NOX4, NOX1, NOX2 (gp91phox, CYBB), NOX5, DUOX2, NOXO1, NOXO2, NOXA1 and NOXA2 (p67phox), comprising administering to the subject an amount of an siRNA which reduces or inhibits expression of at least one of the NOX genes.

[0051] More specifically, the present invention provides methods and compositions useful in treating a patient suffering from acute renal failure (ARF), hearing loss, ocular disease (e.g. glaucoma), acute respiratory distress syndrome (ARDS) and other acute lung and respiratory injuries, lung transplantation, nephrotoxicity, spinal cord injury, pressure sores, and chronic obstructive pulmonary disease (COPD).

[0052] The methods of the invention comprise administering to the patient one or more inhibitory compounds which down-regulate expression of a NOX gene (e.g. NOX4) and in particular siRNA in a therapeutically effective dose, so as to thereby treat the patient.

[0053] In various embodiments the inhibitor is selected from the group consisting of an siRNA, shRNA, an aptamer, an antisense molecule, miRNA, a ribozyme, and an antibody. In preferred embodiments the inhibitor is siRNA.

[0054] According to one embodiment, the present invention provides improved a method for treating or preventing hearing loss associated with an ototoxic drug comprising administering to a subject in need thereof an ototoxic drug having a hearing-impairing side-effect, in combination with a therapeutically effective amount of at least one siRNA compound that inhibits expression of a NOX gene The compositions of the invention can be administered at a suitable interval(s) either prior to, subsequent to, or substantially concurrent with the administration of the ototoxic, hearing-impairing drug that induces inner ear apoptotic tissue damage. In some embodiments, the siRNA and the ototoxic drug are administered separately. In some embodiments the siRNA molecules that inhibit a NOX gene are administered locally while the ototoxic, hearing-impairing drug is administered systemically. The siRNA molecules may be administered prior to, simultaneously with or subsequent to the ototoxic drug.

[0055] In some embodiments the present invention provides a pharmaceutical composition comprising an siRNA that inhibits expression of a NOX gene; and a pharmaceutically acceptable carrier.

[0056] In certain embodiments the pharmaceutical composition further comprises an ototoxic drug. The pharmaceutical composition has lower ototoxicity than the ototoxic pharmaceutical alone, and, preferably, has a higher dosage of the ototoxic pharmaceutical than typically used. Examples of such improved compositions include cisplatin or other ototoxic neoplastic agent or an aminoglycoside antibiotic(s) in combination with the therapeutically effective amount of one or more siRNA molecules that inhibit a NOX gene.

[0057] Still further, the invention relates to the use of the compositions of the invention in cases where diuretics are needed. The present invention provides a solution to the art that has long sought a therapy and a medicament which can treat the ototoxic effects associated with certain diuretics, and particular with the more popular and commonly used loop-diuretics, without sacrificing their diuretic effectiveness.

[0058] In yet other embodiments, the invention relates to the use of the compositions in subjects requiring quinine or quinine-like compounds. The present invention provides a solution to the art that has long sought a therapy and a medicament which can treat the ototoxic effects currently associated with certain quinines without sacrificing their effectiveness.

[0059] The present invention further relates to the use of compounds which down-regulate the expression of a NOX gene, particularly to small interfering RNAs (siRNAs), in the treatment of various diseases, conditions or disorders associated with a NOX gene expression including hearing loss, acute renal failure, ocular disease (e.g. glaucoma), Acute Respiratory Distress Syndrome (ARDS) and other acute lung injuries, lung transplantation, spinal cord injury, pressure sores, and Chronic Obstructive Pulmonary Disease (COPD).

[0060] Lists of 19- and 21-mer sense and corresponding antisense sequences useful in preparation of siRNA compounds are set forth in Tables A-R.

[0061] A list of preferred siRNA to NOX4 is provided in tables A-B, infra.

[0062] A list of preferred siRNA to NOX1 is provided in tables C-D, infra.

[0063] A list of preferred siRNA to NOX2 (CYBB) is provided in tables E-F, infra.

[0064] A list of preferred siRNA to NOX5 is provided in tables G-H, infra.

[0065] A list of preferred siRNA to DUOX2 is provided in tables I-J, infra.

[0066] A list of preferred siRNA to NOXO1 is provided in tables K-L, infra.

[0067] A list of preferred siRNA to NOXO2 (NCF1) is provided in tables M-N, infra.

[0068] A list of preferred siRNA to NOXA1 is provided in tables O-P, infra.

[0069] A list of preferred siRNA to NOXA2 (p67phox, NCF2) is provided in tables Q-R, infra.

[0070] All sequences are provided in 5′-3′ orientation. Where cross-species specificity is known, the species is listed as well. In certain embodiments the preferred gene is NOX4.

[0071] Preferred siRNA compounds are blunt ended 19 base pair compounds, which comprise an oligomer pair set forth in Table A.

[0072] These and further features of the present invention will be better understood in conjunction with the detailed description, examples and claims that follow.

### DETAILED DESCRIPTION OF THE INVENTION

[0073] The present invention relates generally to compounds which down-regulate expression of NOX genes, particularly to novel small interfering RNAs (siRNAs), and to the use of these siRNAs in the treatment of various diseases and medical conditions. Particular diseases and conditions to be treated are hearing loss including chemical-induced oxotoxicity; acute renal failure (ARF), nephritis, ocular disease (e.g glaucoma), Acute Respiratory Distress Syndrome (ARDS) and other acute lung injuries, lung transplantation, nephrotoxicity, spinal cord injury, pressure sores, osteoarthritis (OA) and Chronic Obstructive Pulmonary Disease (COPD).

[0074] Lists of preferred siRNA are provided in Tables A-R, infra. There are separate lists of 19-mer and 21-mer siRNAs, which are prioritized based on their score according to a proprietary algorithm as the best sequences for targeting the human gene expression. Methods, molecules and compositions, which inhibit the NOX genes are discussed herein at length, and any of said molecules and/or compositions may be beneficially employed in the treatment of a patient suffering from any of said conditions. Tables A, C, E, G, I, K, M, O, Q set forth 19-mer oligomers. Tables B, D, F, H, J, L, N, P, R set forth 21-mer oligomers.

### DEFINITIONS

[0075] For convenience certain terms employed in the specification, examples and claims are described herein.

[0076] It is to be noted that, as used herein, the singular forms “a”, “an” and “the” include plural forms unless the content clearly dictates. otherwise.

[0077] Where aspects or embodiments of the invention are described in terms of Markush groups or other grouping of alternatives, those skilled in the art will recognize that the invention is also thereby described in terms of any individual member or subgroup of members of the group.

[0078] An “inhibitor” is a compound which is capable of reducing the expression of a gene or the activity of the product of such gene to an extent sufficient to achieve a desired biological or physiological effect. The term “inhibitor” as used herein refers to one or more of an oligonucleotide inhibitor, including siRNA, shRNA, [synthetic shRNA; miRNA, antisense RNA and DNA and ribozymes. Inhibition may also be referred to as down-regulation or, for RNAi, silencing.

[0079] The term “inhibit” as used herein refers to reducing the expression of a gene or the activity of the product of such gene to an extent sufficient to achieve a desired biological or physiological effect. Inhibition may be complete or partial.

[0080] As used herein, the term “inhibition” of a NOX gene means inhibition of the gene expression (transcription or translation) or polypeptide activity of a gene selected from the group NOX4, NOX1, NOX2 (gp91phox, CYBB), NOX5, DUOX2, NOXO1, NOXO2, NOXA1 and NOXA2 (p67phox), or SNP (single nucleotide polymorphism) or other variants thereof.

[0081] As used herein, the terms “polynucleotide” and “nucleic acid” may be used interchangeably and refer to nucleotide sequences comprising deoxyribonucleic acid (DNA), and ribonucleic acid (RNA). The terms should also be understood to include, as equivalents, analogs of either RNA or DNA made from nucleotide analogs. Throughout this application mRNA sequences are set forth as representing the corresponding genes. The terms “mRNA polynucleotide sequence” and mRNA are used interchangeably.

[0082] “Oligonucleotide” or “oligomer” refers to a deoxyribonucleotide or ribonucleotide sequence from about 2 to about 50 nucleotides. Each DNA or RNA nucleotide may be independently natural or synthetic, and or modified or unmodified. Modifications include changes to the sugar moiety, the base moiety and or the linkages between nucleotides in the oligonucleotide. The compounds of the present invention encompass molecules comprising deoxyribonucleotides, ribonucleotides, modified deoxyribonucleotides, modified ribonucleotides and combinations thereof.

[0083] “Nucleotide” is meant to encompass deoxyribonucleotides and ribonucleotides, which may be natural or synthetic, and or modified or unmodified. Modifications include changes and substitutions to the sugar moiety, the base moiety and/or the internucleotide linkages.

[0084] All analogs of, or modifications to, a nucleotide/oligonucleotide may be employed with the present invention, provided that said analog or modification does not substantially adversely affect the function of the nucleotide/oligonucleotide. Acceptable modifications include modifications of the sugar moiety, modifications of the base moiety, modifications in the internucleotide linkages and combinations thereof.

[0085] The nucleotides can be selected from naturally occurring or synthetic modified bases. Naturally occurring bases include adenine, guanine, cytosine, thymine and uracil. Modified bases of nucleotides include inosine, xanthine, hypoxanthine, 2-aminoadenine, 6-methyl, 2-propyl and other alkyl adenines, 5-halo uracil, 5-halo cytosine, 6-aza cytosine and 6-aza thymine, pseudo uracil, 4-thiouracil, 8-halo adenine, 8-aminoadenine, 8-thiol adenine, 8-thiolalkyl adenines, 8-hydroxyl adenine and other 8-substituted adenines, 8-halo guanines, 8-amino guanine, 8-thiol guanine, 8-thioalkyl guanines, 8-hydroxyl guanine and other substituted guanines, other aza and deaza adenines, other aza and deaza guanines, 5-trifluoromethyl uracil and 5-trifluoro cytosine.

[0086] As used herein, the term “polypeptide” refers to, in addition to a polypeptide, an oligopeptide, peptide and a full protein. For example, several human NOXO1 and NOX1 isoforms are known to be expressed. The present invention provides molecules that inhibit one or more of the isoforms.

RNA Interference and siRNA

[0087] RNA interference (RNAi) is based on the ability of dsRNA species to enter a cytoplasmic protein complex, where it is then targeted to the complementary cellular RNA and specifically degrade it. The RNA interference response features an endonuclease complex containing an siRNA, commonly referred to as an RNA-induced silencing complex (RISC), which mediates cleavage of single-stranded RNA having a sequence complementary to the antisense strand of the siRNA duplex. Cleavage of the target RNA may take place in the middle of the region complementary to the antisense strand of the siRNA duplex (Elbashir et al., Genes Dev., 2001, 15(2):188-200). In more detail, longer dsRNAs are digested into short (17-29 bp) dsRNA fragments (also referred to as short inhibitory RNAs, “siRNAs”) by type III RNAses (DICER, DROSHA, etc.; Bernstein et al., Nature, 2001, 409(6818):363-6; Lee et al., Nature, 2003, 425(6956):415-9). The RISC protein complex recognizes these fragments and complementary mRNA. The whole process is culminated by endonuclease cleavage of target mRNA (McManus & Sharp, Nature Rev Genet, 2002, 3(10):737-47; Paddison & Hannon, Curr Opin Mol Ther. 2003, 5(3):217-24). (For additional information on these terms and proposed mechanisms, see for example Bernstein et al., RNA 2001, 7(11):1509-21; Nishikura, Cell 2001, 107(4):415-8 and PCT publication WO 01/36646).

[0088] The selection and synthesis of siRNA corresponding to known genes has been widely reported; see for example Ui-Tei et al., J Biomed Biotechnol. 2006; 2006: 65052; Chalk et al., Biochem. Biophys. Res. Comm. 2004, 319(1): 264-74; Sioud & Leirdal, Met. Mol. Biol.; 2004, 252:457-69; Levenkova et al., Bioinform. 2004, 20(3):430-2; Ui-Tei et al., Nuc. Acid Res. 2004, 32(3):936-48. For examples of the use of, and production of, modified siRNA see Braasch et al., Biochem., 2003, 42(26):7967-75; Chiu et al., RNA, 2003, 9(9):1034-48; PCT publications WO 2004/015107 (Atugen); WO 02/44321 (Tuschl et al), and U.S. Pat. Nos. 5,898,031 and 6,107,094. See also Dykxhoorn et al 2006, 13, 541-552.

[0089] Several groups have described the development of DNA-based vectors capable of generating siRNA within cells. The method generally involves transcription of short hairpin RNAs that are efficiently processed to form siRNAs within cells (Paddison et al. PNAS USA 2002, 99:1443-1448; Paddison et al. Genes & Dev 2002, 16:948-958; Sui et al. PNAS USA 2002, 8:5515-5520; and Brummelkamp et al. Science 2002, 296:550-553). These reports describe methods to generate siRNAs capable of specifically targeting numerous endogenously and exogenously expressed genes.

[0090] As used herein, the term “nucleic acid” refers to polynucleotides such as deoxyribonucleic acid (DNA), and, where appropriate, ribonucleic acid (RNA). The terms should also be understood to include, as equivalents, analogs of either RNA or DNA made from nucleotide analogs, and, as applicable to the embodiment being described, double-stranded polynucleotides and single-stranded polynucleotides such as sense or antisense.

[0091] “Oligonucleotide” refers to a sequence having from about 2 to about 50 linked nucleotides or linked modified nucleotides, or a combination of modified and unmodified nucleotide. Oligonucleotide includes the terms oligomer, antisense strand and sense strand.

[0092] “Nucleotide” is meant to encompass deoxyribonucleotides and ribonucleotides, which may be natural or synthetic, and or modified or unmodified. Modifications include changes to the sugar moiety, the base moiety and or the linkages between ribonucleotides in the oligoribonucleotide. Table 1, below, sets forth the gene identification number (gi) with an NCBI accession number and the corresponding oligomer tables' listings.

TABLE 1

| | | | Preferred indications or |
|---|---|---|---|
| | | | diseases to be treated |
| | | Oligomer | according to the present |
| | | tables (for | invention (particularly |
| | Full name and Human Gene | siRNA | preferred indications are |
| Gene | ID (mRNA) | compounds) | underlined) |
| NOX4 | NADPH oxidase 4 | A, B | ARF, hearing loss, ARDS, |
| | (gi: 20149638, NM_016931, | | glaucoma, spinal cord injury, |
| | SEQ ID NO: 1) | | COPD, DR, nephritis |
| NOX1 | NADPH oxidase 1 | C, D | ARF, hearing loss, ARDS, |
| | (gi: 21614529, NM_007052 | | glaucoma, spinal cord injury, |
| | isoform 1L; SEQ ID NO: 2) | | COPD, DR, nephritis |
| | (gi: 7669509, NM_013955 | | |
| | isoform 1Lv; SEQ ID NO: 3) | | |
| NOX2 | NADPH oxidase 2 | E, F | ARF, hearing loss, ARDS, |
| (gp91pho, | (gi: 6996020, NM_000397; | | glaucoma, spinal cord injury, |
| CYBB) | SEQ ID NO: 4) | | COPD, OA, DR, nephritis |
| NOX5 | NADPH oxidase 5 | G, H | ARF, hearing loss, ARDS, |
| | (gi: 20127623, NM_024505; | | glaucoma, spinal cord injury, |
| | SEQ ID NO: 5) | | COPD, DR, nephritis |
| DUOX2 | Dual oxidase 2 | I, J | ARF, hearing loss, ARDS, |
| | (gi: 132566531, | | glaucoma, spinal cord injury, |
| | NM_014080; SEQ ID NO: 6) | | COPD, DR, nephritis |
| NOXO1 | NADPH oxidase organizer 1 | K, L | ARF, hearing loss, ARDS, |
| | (gi: 34222190, variant a, | | glaucoma, spinal cord injury, |
| | NM_144603, SEQ ID NO: 7) | | COPD, DR, nephritis |
| | (gi: 41281810, variant b, | | |
| | NM_172167; SEQ ID NO: 8) | | |
| | (gi: 41281827, variant c, | | |
| | NM_172168; SEQ ID NO: 9) | | |
| NOXO2 | NADPH oxidase organizer 2 | M, N | ARF, hearing loss, ARDS, |
| (p47phox, | (gi: 115298671, | | glaucoma, spinal cord injury, |
| NCF1) | NM_000265; SEQ ID | | COPD, DR, nephritis |
| | NO: 10) | | |
| NOXA1 | NADPH oxidase activator 1 | O, P | ARF, hearing loss, ARDS, |
| | (gi: 41393186, NM_006647; | | glaucoma, spinal cord injury, |
| | SEQ ID NO: 11) | | COPD, DR, nephritis |
| NOXA2 | NADPH oxidase activator 2 | Q, R | ARF, hearing loss, ARDS, |
| (p67phox, | (gi: 67189969, NM_000433; | | glaucoma, spinal cord injury, |
| NCF2) | SEQ ID NO: 12) | | COPD, DR, nephritis |

ARF: acute renal failure,
ARDS, acute respiratory distress syndrome,
COPD chronic obstructive pulmonary disease,
DR: diabetic retinopathy.

[0093] All analogues of, or modifications to, a nucleotide/oligonucleotide may be employed with the present invention, provided that said analogue or modification does not substantially affect the function of the nucleotide/oligonucleotide. The nucleotides can be selected from naturally occurring or synthetic modified bases. Naturally occurring bases include adenine, guanine, cytosine, thymine and uracil. Modified bases of nucleotides include inosine, xanthine, hypoxanthine, 2-aminoadenine, 6-methyl, 2-propyl and other alkyl adenines, 5-halo uracil, 5-halo cytosine, 6-aza cytosine and 6-aza thymine, psuedo uracil, 4-thiuracil, 8-halo adenine, 8-aminoadenine, 8-thiol adenine, 8-thiolalkyl adenines, 8-hydroxyl adenine and other 8-substituted adenines, 8-halo guanines, 8-amino guanine, 8-thiol guanine, 8-thioalkyl guanines, 8-hydroxyl guanine and other substituted guanines, other aza and deaza adenines, other aza and deaza guanines, 5-trifluoromethyl uracil and 5-trifluoro cytosine.

[0094] In addition, analogues of polynucleotides can be prepared wherein the structure of one or more nucleotide is fundamentally altered and better suited as therapeutic or experimental reagents. An example of a nucleotide analogue is a peptide nucleic acid (PNA) wherein the deoxyribose (or ribose) phosphate backbone in DNA (or RNA is replaced with a polyamide backbone which is similar to that found in peptides. PNA analogues have been shown to be resistant to enzymatic degradation and to have extended lives in vivo and in vitro. Other modifications include locked nucleic acids (LNA), morpholinos, mirror nucleotides (L-nucleotide; spieglemer), polymer backbones, cyclic backbones, or acyclic backbones. Examples of siRNA compounds comprising LNA nucleotides are disclosed in Elmen et al., (NAR 2005. 33(1):439-447).

[0095] A “mirror” nucleotide is a nucleotide with reversed chirality to the naturally occurring or commonly employed nucleotide, i.e., a mirror image (L-nucleotide) of the naturally occurring (D-nucleotide). The nucleotide can be a ribonucleotide or a deoxyribonucleotide and my further comprise at least one sugar, base and or backbone modification. U.S. Pat. No. 6,602,858 discloses nucleic acid catalysts comprising at least one L-nucleotides substitution.

[0096] The present invention provides methods and compositions for inhibiting expression of a NOX gene in vivo. In general, the method includes administering oligoribonucleotides, in particular small interfering RNAs (i.e., siRNAs) or a nucleic acid material that can produce siRNA in a cell, that targets an mRNA transcribed from a NOX gene in an amount sufficient to down-regulate expression of a target gene by an RNA interference mechanism. In particular, the subject method can be used to inhibit expression of NOX4 for treatment of a disease.

[0097] In accordance with the present invention, the siRNA molecules or other inhibitors of the NOX genes are used as drugs to treat various pathologies.

[0098] The present invention provides double-stranded oligoribonucleotides (eg. siRNAs), which down-regulate the expression of the NOX genes selected from the group consisting of NOX4, NOX1, NOX2 (gp91phox, CYBB), NOX5, DUOX2, NOXO1, NOXO2, NOXA1 and NOXA2 (p67phox). An siRNA of the invention is a duplex oligoribonucleotide in which the sense strand is derived from the mRNA sequence of the NOX genes, and the antisense strand is complementary to the sense strand. In general, some deviation from the target mRNA sequence is tolerated without compromising the siRNA activity (see e.g. Czauderna et al., Nuc. Acids Res. 2003, 31(11):2705-2716). An siRNA of the invention inhibits gene expression on a post-transcriptional level with or without destroying the mRNA. Without being bound by theory, siRNA may target the mRNA for specific cleavage and degradation and/or may inhibit translation from the targeted message.

[0099] In some embodiments the oligoribonucleotide according to the present invention comprises modified siRNA. In various embodiments the siRNA comprises an RNA duplex comprising a first strand and a second strand, whereby the first strand comprises a ribonucleotide sequence at least partially complementary to about 18 to about 40 consecutive nucleotides of a target nucleic acid, and the second strand comprises ribonucleotide sequence at least partially complementary to the first strand and wherein said first strand and/or said second strand comprises a plurality of groups of modified ribonucleotides having a modification at the 2′-position of the sugar moiety whereby within each strand each group of modified ribonucleotides is flanked on one or both sides by a group of flanking ribonucleotides whereby each ribonucleotide forming the group of flanking ribonucleotides is selected from an unmodified ribonucleotide or a ribonucleotide having a modification different from the modification of the groups of modified ribonucleotides. The oligoribonucleotide according to the present invention may comprise a 2′ modification on the sugar moiety of at least one ribonucleotide (“2′ sugar modification”). In certain embodiments the compound comprises 2′O-alkyl or 2′-fluoro or 2′O-allyl or any other 2′ sugar modification, optionally on alternate positions.

[0100] Other stabilizing modifications are also possible (eg. modified nucleotides added to a 3′ or 5′ terminus of an oligomer). Other modifications include additions to the 5′ and/or 3′ termini of the oligonucleotides. Such terminal modifications may be lipids, peptides, sugars or other molecules.

[0101] The group of modified ribonucleotides and/or the group of flanking ribonucleotides comprise a number of ribonucleotides selected from the group consisting of an integer from 1 to 10. Accordingly, the group thus comprises one nucleotide, two nucleotides, three nucleotides, four nucleotides, five nucleotides, six nucleotides, seven nucleotides, eight nucleotides, nine nucleotides or ten nucleotides.

[0102] The groups of modified nucleotides and flanking nucleotides may be organized in a pattern on at least one of the strands.

[0103] In some embodiments the first and second strands comprise a pattern of modified nucleotides. In various embodiments the pattern of modified nucleotides of said first strand is identical relative to the pattern of modified nucleotides of the second strand.

[0104] In other embodiments the pattern of modified nucleotides of said first strand is shifted by one or more nucleotides relative to the pattern of modified nucleotides of the second strand.

[0105] In some preferred embodiments the middle ribonucleotide in the first strand (antisense) is an unmodified nucleotide. For example, in a 19-oligomer antisense strand, ribonucleotide number 10 is unmodified; in a 21-oligomer antisense strand, ribonucleotide number 11 is unmodified; and in a 23-oligomer antisense strand, ribonucleotide number 12 is unmodified. The modifications or pattern of modification, if any, of the siRNA must be planned to allow for this.

[0106] The modifications on the 2′ moiety of the sugar residue include amino, fluoro, methoxy alkoxy, alkyl, amino, fluoro, chloro, bromo, CN, CF, imidazole, carboxylate, thioate, C₁ to C₁₀ lower alkyl, substituted lower alkyl, alkaryl or aralkyl, OCF₃, OCN, O-, S-, or N-alkyl; O-, S, or N-alkenyl; SOCH₃; SO₂CH₃; ONO₂; NO₂, N₃; heterozycloalkyl; heterozycloalkaryl; aminoalkylamino; polyalkylamino or substituted silyl, as described, inter alfa, in European patents EP 0 586 520 B1 and EP 0 618 925 B1.

[0107] In some embodiments the siRNA is blunt ended, on one or both ends. More specifically, the siRNA may be blunt ended on the end defined by the 5′-terminus of the first strand and the 3′-terminus of the second strand, or the end defined by the 3′-terminus of the first strand and the 5′-terminus of the second strand.

[0108] In other embodiments at least one of the two strands may have an overhang of at least one nucleotide at the 5′-terminus; the overhang may consist of at least one deoxyribonucleotide. At least one of the strands may also optionally have an overhang of at least one nucleotide at the 3′-terminus. The overhang may consist of from about 1 to about 4 nucleotides.

[0109] The length of RNA duplex is from about 18 to about 40 ribonucleotides, preferably 19 to 23 ribonucleotides. Further, the length of each strand (oligomer) may independently have a length selected from the group consisting of about 15 to about 40 bases, preferably 18 to 23 bases and more preferably 19 or 21 ribonucleotides.

[0110] Additionally, in certain preferred embodiments the complementarity between said first strand and the target nucleic acid can be perfect. In some embodiments, the strands are substantially complementary, i.e. having one, two or up to three mismatches between said first strand and the target nucleic acid.

[0111] In some embodiments the first strand and the second strand each comprise at least one group of modified ribonucleotides and at least one group of flanking ribonucleotides, whereby each group of modified ribonucleotides comprises at least one ribonucleotide and whereby each group of flanking ribonucleotides comprises at least one ribonucleotide, wherein each group of modified ribonucleotides of the first strand is aligned with a group of flanking ribonucleotides on the second strand, and wherein the 5′ most terminal ribonucleotide is selected from a group of modified ribonucleotides, and the 3′ most terminal ribonucleotide of the second strand is a selected from the group of flanking ribonucleotide. In some embodiments each group of modified ribonucleotides consists of a single ribonucleotide and each group of flanking ribonucleotides consists of a single nucleotide.

[0112] In yet other embodiments the ribonucleotide forming the group of flanking ribonucleotides on the first strand is an unmodified ribonucleotide arranged in a 3′ direction relative to the ribonucleotide forming the group of modified ribonucleotides, and the ribonucleotide forming the group of modified ribonucleotides on the second strand is a modified ribonucleotide which is arranged in 5′ direction relative to the ribonucleotide forming the group of flanking ribonucleotides. In some embodiments the first strand of the siRNA comprises five to about twenty, eight to twelve, preferably ten or twelve groups of modified ribonucleotides, and the second strand comprises seven to eleven, preferably nine or eleven groups of modified ribonucleotides. The first strand and the second strand may be linked by a loop structure, which may be comprised of a non-nucleic acid polymer such as, inter alia, polyethylene glycol. Alternatively, the loop structure may be comprised of a nucleic acid, including modified and non-modified ribonucleotides and modified and non-modified deoxyribonucleotides.

[0113] Further, the 5′-terminus of the first strand of the siRNA may be linked to the 3′-terminus of the second strand, or the 3′-terminus of the first strand may be linked to the 5′-terminus of the second strand, said linkage being via a nucleic acid linker typically having a length between 3-100 nucleotides, preferably about 3 to about 10 nucleotides.

[0114] According to the present invention the siRNA compounds are chemically and or structurally modified according to the following, or as tandem siRNA or RNAstar.

[0115] In one aspect the present invention provides a compound set forth as Structure (A):

| | |
|---|---|
| (A) | |
| 5′ (N)ₓ-Z | 3′ (antisense strand) |
| 3′ Z′-(N′)_{y} | 5′ (sense strand) |

wherein each of N and N′ is a nucleotide selected from an unmodified ribonucleotide, a modified ribonucleotide, an unmodified deoxyribonucleotide and a modified deoxyribonucleotide;
wherein each of (N)ₓ and (N′)_{y} is an oligonucleotide in which each consecutive N or N′ is joined to the next N or N′ by a covalent bond;
wherein each of x and y is an integer between 18 and 40;
wherein each of Z and Z′ may be present or absent, but if present is 1-5 consecutive nucleotides covalently attached at the 3′ terminus of the strand in which it is present; and
wherein the sequence of (N)ₓ comprises an antisense sequence having substantial identity to about 18 to about 40 consecutive ribonucleotides in the mRNA transcribed from a gene selected from the group consisting of NOX4, NOX1, NOX2 (gp91phox, CYBB), NOX5, DUOX2, NOXO1, NOXA1 and NOXA2 (p67phox), with the proviso that each of (N)ₓ and (N′)_{y} does not comprise more than 50%, 60%, 70% or 80% unmodified deoxyribonucleotide or modified deoxyribonucleotide. In certain embodiments the antisense and sense sequences are selected from the sequences presented in Tables A-R. In preferred embodiments the antisense and sense sequences are selected from Table A.

[0116] It will be readily understood by those skilled in the art that the compounds of the present invention consist of a plurality of modified and/or unmodified ribonucleotides, which are linked through covalent linkages. Each such covalent linkage may be a phosphodiester linkage, a phosphorothioate linkage, or a combination of both, along the length of the ribonucleotide sequence of the individual strand. Other possible backbone modifications are described inter alia in U.S. Pat. Nos. 5,587,361; 6,242,589; 6,277,967; 6,326,358; 5,399,676; 5,489,677; and 5,596,086.

[0117] In particular embodiments, x and y are independently an integer between about 18 to about 40, preferably from about 19 to about 23. In a particular embodiment, x is equal to y (i.e. x=y) and in preferred embodiments x=y=19, x=y=20 or x=y=21. In a particularly preferred embodiment x=y=19.

[0118] In one embodiment of the compound of the invention, Z and Z′ are both absent; in another embodiment one of Z or Z′ is present.

[0119] In one embodiment all of the ribonucleotides of the compound are unmodified in their sugar residues.

[0120] In certain preferred embodiments at least one ribonucleotide is modified in its sugar residue, preferably by the addition of a moiety at the 2′ position. A preferred moiety is selected from the group consisting of amino, fluoro, methoxy, alkoxy and alkyl groups. In a presently preferred embodiment the moiety at the 2′ position is methoxy (2′-O-Me).

[0121] Thus, in certain embodiments the present invention provides a compound having structure B (structures having alternating 2′-O-methyl modification in both strands:

| | |
|---|---|
| (B) | |
| 5′ (N)x | 3′ antisense strand |
| 3′ (N′)y | 5′ sense strand |

wherein each of (N)ₓ and (N′)_{y} is an oligomer in which each consecutive N or N′ is an unmodified ribonucleotide or a modified ribonucleotide joined to the next N or N′ by a covalent bond;
wherein each of x and y=19, 21 or 23 and (N)ₓ and (N′)_{y} are fully complementary
wherein alternating ribonucleotides in each of (N)ₓ and (N′)_{y} are modified to result in a 2′-O-methyl modification in the sugar residue of the ribonucleotides;
wherein the sequence of (N′)_{y} is a sequence complementary to (N)ₓ; and wherein the sequence of (N)ₓ is present in any one of Tables A-R.

[0122] In some embodiments each of (N)ₓ and (N′)_{y} is independently phosphorylated or non-phosphorylated at the 3′ and 5′ termini.

[0123] In certain embodiments of the invention, alternating ribonucleotides are modified in both the antisense and the sense strands of the compound.

[0124] In certain embodiments wherein each of x and y=19 or 23, each N at the 5′ and 3′ termini of (N)ₓ is modified; and

each N′ at the 5′ and 3′ termini of (N′)_{y} is unmodified.

[0125] In certain embodiments wherein each of x and y=21, each N at the 5′ and 3′ termini of (N)ₓ is unmodified; and

each N′ at the 5′ and 3′ termini of (N′)_{y} is modified.

[0126] In particular embodiments, when x and y=19, the siRNA is modified such that a 2′-O-methyl (2′-OMe) group is present on the first, third, fifth, seventh, ninth, eleventh, thirteenth, fifteenth, seventeenth and nineteenth nucleotide of the antisense strand (N)ₓ, and whereby the very same modification, i.e. a 2′-OMe group, is present at the second, fourth, sixth, eighth, tenth, twelfth, fourteenth, sixteenth and eighteenth nucleotide of the sense strand (N′)_{y}. In various embodiments these particular siRNA compounds are blunt ended at both termini.

[0127] In preferred embodiments of the invention, alternating ribonucleotides are modified in both the antisense and the sense strands of the compound. In particular the exemplified siRNA has been modified such that a 2′-O-methyl (Me) group was present on the first, third, fifth, seventh, ninth, eleventh, thirteenth, fifteenth, seventeenth and nineteenth nucleotide of the antisense strand, whereby the very same modification, i.e. a 2′-O-Me group, was present at the second, fourth, sixth, eighth, tenth, twelfth, fourteenth, sixteenth and eighteenth nucleotide of the sense strand. Additionally, it is to be noted that these particular siRNA compounds are also blunt ended.

[0128] In various preferred embodiments of the compounds of the invention having alternating ribonucleotides modified in both the antisense and the sense strands of the compound, for 19-mers and 23-mers the ribonucleotides at the 5′ and 3′ termini of the antisense strand are modified in their sugar residues, and the ribonucleotides at the 5′ and 3′ termini of the sense strand are unmodified in their sugar residues. For 21 mers the ribonucleotides at the 5′ and 3′ termini of the sense strand are modified in their sugar residues, and the ribonucleotides at the 5′ and 3′ termini of the antisense strand are unmodified in their sugar residues. As mentioned above, it is preferred that the middle nucleotide of the antisense strand is unmodified.

[0129] According to one preferred embodiment of the invention, the antisense and the sense strands of the siRNA are phosphorylated only at the 3′-terminus and not at the 5′-terminus. According to another preferred embodiment of the invention, the antisense and the sense strands are non-phosphorylated. According to yet another preferred embodiment of the invention, the 5′ most ribonucleotide in the sense strand is modified, for example to abolish any possibility of in vivo 5′-phosphorylation.

[0130] The invention further provides a vector capable of expressing any of the aforementioned oligoribonucleotides in unmodified form in a cell after which appropriate modification may be made. In preferred embodiment the cell is a mammalian cell, preferably a human cell.

[0131] Substantially complementary refers to complementarity of greater than about 84%, to another sequence. For example in a duplex region consisting of 19 base pairs one mismatch results in 94.7% complementarity, two mismatches results in about 89.5% complementarity and 3 mismatches results in about 84.2% complementarity, rendering the duplex region substantially complementary. Accordingly substantially identical refers to identity of greater than about 84%, to another sequence.

[0132] More particularly, the invention provides an antisense oligoribonucleotide wherein one strand comprises consecutive nucleotides having, from 5′ to 3′, the sequence set forth in Tables A-R, or a homolog thereof wherein in up to two of the ribonucleotides in each terminal region is altered.

[0133] The terminal region of the oligoribonucleotide refers to bases 1-4 and/or 16-19 in the 19-mer sequence and to bases 1-4 and/or 18-21 in the 21-mer sequence.

[0134] Additionally, the invention provides sense oligoribonucleotides wherein one strand comprises consecutive nucleotides having, from 5′ to 3′, the sequence set forth in Tables A-R or a homolog thereof wherein in up to two of the ribonucleotides in each terminal region is altered.

[0135] Preferred lists of siRNA (sense and antisense strands) directed to NOX4 are set forth in Tables A and B. Tables C through R provide lists of 19- and 21-mer sequences useful in the preparation of siRNA compounds NOX1, NOX2 (gp91phox, CYBB), NOX5, DUOX2, NOXO1, NOXO2, NOXA1 and NOXA2 (p67phox), respectively. The presently most preferred compound of the invention is a blunt-ended 19-mer siRNA, i.e. x=y=19 and Z and Z′ are both absent. The siRNA is either phosphorylated at 3′ termini of both sense and anti-sense strands, or non-phosphorylated at all; or having the 5′ most ribonucleotide on the sense strand specifically modified to abolish any possibility of in vivo 5′-phosphorylation. The alternating ribonucleotides are modified at the 2′ position of the sugar residue in both the antisense and the sense strands, wherein the moiety at the 2′ position is methoxy (2′-O-methyl) and wherein the ribonucleotides at the 5′ and 3′ termini of the antisense strand are modified in their sugar residues, and the ribonucleotides at the 5′ and 3′ termini of the sense strand are unmodified in their sugar residues.

[0136] For all the above structures, in various embodiments x=y and each of x and y is 19, 20, 21, 22 or 23. In certain embodiments, x=y=19. In yet other embodiments x=y=23. In additional embodiments the compound comprises modified ribonucleotides in alternating positions wherein each N at the 5′ and 3′ termini of (N)ₓ are modified in their sugar residues and the middle ribonucleotide is not modified, e.g. ribonucleotide in position 10 in a 19-mer strand or 11 in a 21-mer strand or 12 in a 23-mer strand.

[0137] In some embodiments, neither (N)ₓ nor (N′)_{y} are phosphorylated at the 3′ and 5′ termini. In other embodiments either or both (N)ₓ and (N′)_{y} are phosphorylated at the 3′ termini. In yet another embodiment, either or both (N)ₓ and (N′)_{y} are phosphorylated at the 3′ termini using non-cleavable phosphate groups. In yet another embodiment, either or both (N)ₓ and (N′)_{y} are phosphorylated at the terminal 2′ termini position using cleavable or non-cleavable phosphate groups.

[0138] In certain embodiments for all the above-mentioned Structures, the compound is blunt ended, for example wherein both Z and Z′ are absent. In an alternative embodiment, the compound comprises at least one 3′ overhang, wherein at least one of Z or Z′ is present. Z and Z′ can be independently comprise one or more covalently linked modified or non-modified nucleotides. In some embodiments each of Z and Z′ are independently selected from dT and dTdT. siRNA in which Z and/or Z′ is present have similar activity and stability as siRNA in which Z and Z′ are absent.

[0139] Additional nucleic acids according to the present invention comprise at least 14 contiguous nucleotides of any one of the polynucleotides in Tables A-R and more preferably 14 contiguous nucleotide base pairs at any end of the double-stranded structure. It will be understood by one skilled in the art that given the potential length of the nucleic acid according to the present invention and particularly of the individual stretches forming such nucleic acid according to the present invention, some shifts relative to the coding sequence of the mammalian NOX genes of the present invention to each side is possible, whereby such shifts can be up to 1, 2, 3, 4, 5 and 6 nucleotides in both directions, and whereby the thus generated double-stranded nucleic acid molecules shall also be within the present invention.

[0140] An additional novel molecule provided by the present invention is an oligonucleotide comprising consecutive nucleotides wherein a first segment of such nucleotides encode a first inhibitory RNA molecule, a second segment of such nucleotides encode a second inhibitory RNA molecule, and a third segment of such nucleotides encode a third inhibitory RNA molecule. Each of the first, the second and the third segment may comprise one strand of a double stranded RNA and the first, second and third segments may be joined together by a linker. Further, the oligonucleotide may comprise three double stranded segments joined together by one or more linker.

[0141] Thus, one molecule provided by the present invention is an oligonucleotide comprising consecutive nucleotides which encode three inhibitory RNA molecules; said oligonucleotide may possess a triple stranded structure, such that three double stranded arms are linked together by one or more linker, such as any of the linkers presented hereinabove. This molecule forms a “star”-like structure, and may also be referred to herein as RNAstar. Said triple-stranded oligonucleotide may be an oligoribonucleotide having the general structure:

| | | | | |
|---|---|---|---|---|
| 5′ | Oligo1 (sense) | LINKER A | Oligo2 (sense) | 3′ |
| 3′ | Oligo1 (antisense) | LINKER B | Oligo3 (sense) | 5′ |
| 3′ | Oligo3 (antisense) | LINKER C | Oligo2 (antisense) | 5′ |
| or | | | | |
| 5′ | Oligo1 (sense) | LINKER A | Oligo2 (antisense) | 3′ |
| 3′ | Oligo1 (antisense) | LINKER B | Oligo3 (sense) | 5′ |
| 3′ | Oligo3 (antisense) | LINKER C | Oligo2 (sense) | 5′ |
| or | | | | |
| 5′ | Oligo1 (sense) | LINKER A | Oligo3 (antisense) | 3′ |
| 3′ | Oligo1 (antisense) | LINKER B | Oligo2 (sense) | 5′ |
| 5′ | Oligo3 (sense) | LINKER C | Oligo2 (antisense) | 3′ |

wherein one or more of linker A, linker B or linker C is present; any combination of two or more oligonucleotides and one or more of linkers A-C is possible, so long as the polarity of the strands and the general structure of the molecule remains. Further, if two or more of linkers A-C are present, they may be identical or different.

[0142] Thus, a triple-armed structure is formed, wherein each arm comprises a sense strand and complementary antisense strand (i.e. Oligol antisense base pairs to Oligol sense etc.). The triple armed structure may be triple stranded, whereby each arm possesses base pairing.

[0143] Further, the above triple stranded structure may have a gap instead of a linker in one or more of the strands. Such a molecule with one gap is technically quadruple stranded and not triple stranded; inserting additional gaps or nicks will lead to the molecule having additional strands. Preliminary results obtained by the inventors of the present invention indicate that said gapped molecules are more active in inhibiting certain target genes than the similar but non-gapped molecules. This may also be the case for nicked molecules.

[0144] The compounds of the present invention can be synthesized by any of the methods that are well-known in the art for synthesis of ribonucleic (or deoxyribonucleic) oligonucleotides. Such synthesis is, among others, described in Beaucage S. L. and Iyer R. P., Tetrahedron 1992; 48: 2223-2311, Beaucage S. L. and Iyer R. P., Tetrahedron 1993; 49: 6123-6194 and Caruthers M. H. et. al., Methods Enzymol. 1987; 154: 287-313; the synthesis of thioates is, among others, described in Eckstein F., Annu. Rev. Biochem. 1985; 54: 367-402, the synthesis of RNA molecules is described in Sproat B., in Humana Press 2005 edited by Herdewijn P.; Kap. 2: 17-31 and respective downstream processes are, among others, described in Pingoud A. et. al., in IRL Press 1989 edited by Oliver R. W. A.; Kap. 7: 183-208 and Sproat B., in Humana Press 2005 edited by Herdewijn P.; Kap. 2: 17-31 (supra).

[0145] Other synthetic procedures are known in the art e.g. the procedures as described in Usman et al., 1987, J. Am. Chem. Soc., 109, 7845; Scaringe et al., 1990, Nucleic Acids Res., 18, 5433; Wincott et al., 1995, Nucleic Acids Res. 23, 2677-2684; and Wincott et al., 1997, Methods Mol. Bio., 74, 59, and these procedures may make use of common nucleic acid protecting and coupling groups, such as dimethoxytrityl at the 5′-end, and phosphoramidites at the 3′-end. The modified (e.g. 2′-O-methylated) nucleotides and unmodified nucleotides are incorporated as desired.

[0146] The oligonucleotides of the present invention can be synthesized separately and joined together post-synthetically, for example, by ligation (Moore et al., 1992, Science 256, 9923; Draper et al., International PCT publication No. WO93/23569; Shabarova et al., 1991, Nucleic Acids Research 19, 4247; Bellon et al., 1997, Nucleosides & Nucleotides, 16, 951; Bellon et al., 1997, Bioconjugate Chem. 8, 204), or by hybridization following synthesis and/or deprotection.

[0147] It is noted that a commercially available machine (available, inter alia, from Applied Biosystems) can be used; the oligonucleotides are prepared according to the sequences disclosed herein. Overlapping pairs of chemically synthesized fragments can be ligated using methods well known in the art (e.g., see U.S. Pat. No. 6,121,426). The strands are synthesized separately and then are annealed to each other in the tube. Then, the double-stranded siRNAs are separated from the single-stranded oligonucleotides that were not annealed (e.g. because of the excess of one of them) by HPLC. In relation to the siRNAs or siRNA fragments of the present invention, two or more such sequences can be synthesized and linked together for use in the present invention.

[0148] The compounds of the invention can also be synthesized via a tandem synthesis methodology, as described in US patent application publication No. US2004/0019001 (McSwiggen), wherein both siRNA strands are synthesized as a single contiguous oligonucleotide fragment or strand separated by a cleavable linker which is subsequently cleaved to provide separate siRNA fragments or strands that hybridize and permit purification of the siRNA duplex. The linker can be a polynucleotide linker or a non-nucleotide linker.

### Pharmaceutical Compositions

[0149] While it may be possible for the compounds of the present invention to be administered as the raw chemical, it is preferable to present them as a pharmaceutical composition. Accordingly the present invention provides a pharmaceutical composition comprising one or more of the compounds of the invention; and a pharmaceutically acceptable carrier. This composition may comprise a mixture of two or more different oligonucleotides/siRNAs.

[0150] The invention further provides a pharmaceutical composition comprising at least one compound of the invention covalently or non-covalently bound to one or more compounds of the invention in an amount effective to inhibit one or more genes as disclosed above; and a pharmaceutically acceptable carrier. The compound may be processed intracellularly by endogenous cellular complexes to produce one or more oligoribonucleotides of the invention.

[0151] The invention further provides a pharmaceutical composition comprising a pharmaceutically acceptable carrier and one or more of the compounds of the invention in an amount effective to down-regulate expression in a cell of a target gene, the compound comprising a sequence substantially complementary to the sequence of (N)ₓ. In certain embodiments, the target gene is a viral, bacterial or mammalian gene. In various embodiments the target gene is a mammalian gene, preferably a human gene.

[0152] Additionally, the invention provides a method of inhibiting the expression of a target gene, by at least 50% as compared to a control, comprising contacting an mRNA transcript of the target gene with one or more of the compounds of the invention. In some embodiments an active siRNA compound inhibits gene expression at a level of at least 50%, 60% or 70% as compared to control. In certain preferred embodiments inhibition is at a level of at least 75%, 80% or 90% as compared to control. In some embodiments the target gene is a pro-apoptotic gene as disclosed herein.

[0153] In one embodiment the oligoribonucleotide is inhibiting one or more of the NOX genes of the present invention, whereby the inhibition is selected from the group comprising inhibition of gene function, inhibition of polypeptide and inhibition of mRNA expression.

[0154] In one embodiment the compound inhibits expression of a polypeptide encoded by a target gene whereby the inhibition is selected from the group comprising inhibition of function (which may be examined by an enzymatic assay or a binding assay with a known interactor of the native gene/polypeptide, inter alia), inhibition of protein (which may be examined by Western blotting, ELISA or immuno-precipitation, inter alia) and inhibition of mRNA expression (which may be examined by Northern blotting, quantitative RT-PCR, in-situ hybridisation or microarray hybridisation, inter alia).

[0155] In additional embodiments the invention provides a method of treating a subject suffering from a disease accompanied by an elevated level of the NOX genes of the present invention, the method comprising administering to the subject a compound of the invention in a therapeutically effective dose thereby treating the subject.

[0156] More particularly, the invention provides an oligoribonucleotide wherein one strand comprises consecutive nucleotides having, from 5′ to 3′, any one of the sequences set forth in Tables A-R or a homolog thereof wherein up to two of the ribonucleotides do not base pair with the ribonucleotide in the complementary strand

[0157] Additionally, further nucleic acids according to the present invention comprise at least 14 contiguous nucleotides of any one of the polynucleotides oligomers set forth in any one of Tables A-R and more preferably 14 contiguous nucleotide base pairs at any end of the double-stranded structure comprised of the first strand and second strand as described above.

### Methods of Treatment

[0158] In preferred embodiments the subject being treated is a warm-blooded animal and, in particular, mammals including human.

[0159] The term “treatment” as used herein refers to administration of a therapeutic substance to a subject in need thereof in an amount effective to ameliorate symptoms associated with a disease, to lessen the severity or cure the disease, or to prevent the disease from occurring.

[0160] Additionally, the invention provides a method of down-regulating the expression of a mammalian NOX genes selected from the group consisting of NOX4, NOX1, NOX2 (gp91phox, CYBB), NOX5, DUOX2, NOXO1, NOXO2, NOXA1 and NOXA2 (p67phox) by at least 50% as compared to a control comprising contacting a NOX mRNA transcript selected from the group consisting of NOX4, NOX1, NOX2 (gp91phox, CYBB), NOX5, DUOX2, NOXO1, NOXO2, NOXA1 and NOXA2 (p67phox), respectively with one or more of the compounds of the present invention.

[0161] In one embodiment the compound of the present invention is down-regulating one or more mammalian NOX genes selected from the group consisting of NOX4, NOX1, NOX2 (gp91phox, CYBB), NOX5, DUOX2, NOXO1, NOXO2, NOXA1 and NOXA2 (p67phox), whereby the down-regulation is selected from the group comprising down-regulation of gene function, down-regulation of polypeptide and down-regulation of mRNA expression.

[0162] In one embodiment the compound is down-regulating a mammalian NOX polypeptide, whereby the down-regulation is selected from the group comprising down-regulation of function (which may be examined by an enzymatic assay or a binding assay with a known interactor of the native gene/polypeptide, inter alia), down-regulation of protein (which may be examined by Western blotting, ELISA or immuno-precipitation, inter alia) and down-regulation of mRNA expression (which may be examined by Northern blotting, quantitative RT-PCR, in-situ hybridisation or microarray hybridisation, inter alia).

[0163] In additional embodiments the invention provides a method of treating a patient suffering from a disease accompanied by an elevated level of a mammalian NOX gene, the method comprising administering to the patient a compound or composition of the invention in a therapeutically effective dose thereby treating the patient.

[0164] The present invention relates to the use of compounds which down-regulate the expression of a mammalian NOX gene particularly to novel small interfering RNAs (siRNAs), in the treatment of the following diseases or conditions in which inhibition of the expression of the mammalian NOX gene is beneficial: hearing loss, acute renal failure, ocular disease e.g. glaucoma, Acute Respiratory Distress Syndrome and other acute lung injuries, lung transplantation, spinal cord injury, pressure sores, osteoarthritis and Chronic Obstructive Pulmonary Disease (COPD). Other indications include chemical-induced nephrotoxicity and chemical-induced neurotoxicty, for example toxicity induced by cisplatin and cispaltin-like compounds, by aminoglycosides, by loop diuretics, and by hydroquinone and their analogs.

[0165] Methods, molecules and compositions which inhibit the mammalian NOX gene or polypeptide are discussed herein at length, and any of said molecules and/or compositions may be beneficially employed in the treatment of a patient suffering from any of said conditions. In certain preferred embodiments the NOX gene is NOX4. A list of siRNAs directed to NOX4 gene are listed in Table A, infra. The number in parenthesis (#) indicates the number of the compound in the respective table, supra.

| Certain preferred NOX4 siRNA | |
|---|---|
| compounds include: | |
| NOX4 (#4 TABLE A): | |
| Antisense 5′-3′ | UCUAGAUUGAAUGAAGGGC |
| Sense 3′-5′ | AGAUCUAACUUACUUCCCG |
| NOX4 (#55 TABLE A): | |
| Antisense 5′-3′ | UUUCUCCAAUUAUCUUCUG |
| Sense 3′-5′ | AAAGAGGUUAAUAGAAGAC |
| NOX4 (#184 TABLE A): | |
| Antisense 5′-3′ | AAGUCUUAGAAAUUGCACU |
| Sense: 3′-5′ | UUCAGAAUCUUUAACGUGA |
| Certain preferred NOX2 (CYBB) siRNA | |
| compounds include: | |
| CYBB (#6 TABLE E) | |
| Antisense 5′-3′ | AAUUCAUUAUCCCAGUUGG |
| Sense 3′-5′ | UUAAGUAAUAGGGUCAACC |
| CYBB (#7 TABLE E) | |
| Antisense 5′-3′ | AAUGACCAAUAUGAGACCC |
| Sense 3′-5′ | UUACUGGUUAUACUCUGGG |
| CYBB (#2 TABLE E) | |
| Antisense 5′-3′ | UUAUGUCCUAAUGAUCUGG |
| Sense 3′-5′ | AAUACAGGAUUACUAGACC |
| CYBB (#1, TABLE E) | |
| Antisense 5′-3′ | AAGAACAAAAAGAAAACCC |
| Sense 3′-5′ | UUCUUGUUUUUGUUUUGGG |
| Certain preferred NOX1 siRNA | |
| compounds include: | |
| NOX1 (#3 TABLE C) | |
| Antisense 5′-3′ | AACAGGAAAACAUUCAGCC |
| Sense 3′-5′ | UUGUCCUUUUGUAAGUCGG |
| NOX1 (#1 TABLE C) | |
| Antisense 5′-3′ | UUAAAAUUCAAGCAGAGAG |
| Sense 3′-5′ | AAUUUUAAGUUCGUCUCUC |
| NOX1 (#60 TABLE C) | |
| Antisense 5′-3′ | GUGUAGUAGUAUUUGUCGG |
| Sense 3′-5′ | CACAUCAUCAUAAACAGCC |
| NOX1 (#17 TABLE C) | |
| Antisense 5′-3′ | AUCAUGAGAUAGGCUGGAG |
| Sense 3′-5′ | UAGUACUCUAUCCGACCUC |
| NOX1 (#26 TABLE C) | |
| Antisense 5′-3′ | UCAAAGUUAAACAGGUGUG |
| Sense 3′-5′ | AGUUUCAAUUUGUCUACAC |
| Certain preferred NOXO1 siRNA | |
| compounds include: | |
| NOXO1 (#4 TABLE K) | |
| Antisense 5′-3′ | UUUGGAGCCUCUUGAUCUG |
| Sense 3′-5′ | AAACCUCGGAGAACUAGAC |
| NOXO1 (#2 TABLE K) | |
| Antisense 5′-3′ | UCUGACGUUUCCAACACGC |
| Sense 3′-5′ | AGACUGCAAAGGUUGUCAG |
| NOXO1 (#7 TABLE K) | |
| Antisense 5′-3′ | AGAAUAGGUUUCCAACAGC |
| Sense 3′-5′ | UCUUAUCCAAAGGUUGUCG |
| NOXO1 (#10 TABLE K) | |
| Antisense 5′-3′ | AGAAGGCAAACGUUUGGAG |
| Sense 3′-5′ | UCUUCCGUUUGCAAACCUC |
| NOXO1 (#8 TABLE K) | |
| Antisense 5′-3′ | CUGAAUUCGUCCCAACUCC |
| Sense 3′-5′ | GACUUAAGCAGGGUUGAGG |

[0166] “Treatment” refers to both therapeutic treatment and prophylactic or preventative measures, wherein the object is to prevent or slow down (lessen) NOX-related disorder as listed above. Those in need of treatment include those already experiencing the disease or condition, those prone to having the disease or condition, and those in which the disease or condition is to be prevented. The compounds of the invention may be administered before, during or subsequent to the onset of the disease or condition.

[0167] The method of the invention includes administering a therapeutically effective amount of one or more compounds which down-regulate expression of the NOX gene, particularly the novel siRNAs of the present invention, small molecule inhibitors of the NOX gene or protein or antibodies to the NOX proteins.

[0168] In some preferred embodiments, the methods of the invention are applied to various conditions of hearing loss. Without being bound by theory, the hearing loss may be due to inner ear hair cell damage or loss, wherein the damage or loss is caused by, inter alia, infection, mechanical injury, loud sound, aging (presbycusis or loss of hearing that gradually occurs in most individuals as they grow older), or chemical-induced ototoxicity. Ototoxins include therapeutic drugs including antineoplastic agents, salicylates, quinines, and aminoglycoside antibiotics, contaminants in foods or medic inals, and environmental or industrial pollutants. Typically, treatment is performed to prevent or reduce ototoxicity, especially resulting from or expected to result from administration of therapeutic drugs. Preferably a therapeutically effective composition is given immediately after the exposure to prevent or reduce the ototoxic effect. More preferably, treatment is provided prophylactically, either by administration of the composition prior to or concomitantly with the ototoxic pharmaceutical or the exposure to the ototoxin.

[0169] By “ototoxin” in the context of the present invention is meant a substance that through its chemical action injures, impairs or inhibits the activity of the sound receptors component of the nervous system related to hearing, which in turn impairs hearing (and/or balance). In the context of the present invention, ototoxicity includes a deleterious effect on the inner ear hair cells Ototoxic agents that cause hearing impairments include, but are not limited to, neoplastic agents such as vincristine, vinblastine, cisplatin and cisplatin-like compounds, taxol and taxol-like compounds, dideoxy-compounds, e.g., dideoxyinosine; alcohol; metals; industrial toxins involved in occupational or environmental exposure; contaminants of food or medicinals; and over-doses of vitamins or therapeutic drugs, e.g., antibiotics such as penicillin or chloramphenicol, and megadoses of vitamins A, D, or B6, salicylates, quinines and loop diuretics.

[0170] The ototoxic effects of various therapeutic drugs on auditory cells and spiral ganglion neurons are often the limiting factor for their therapeutic usefulness. Main ototoxic drugs include the widely used chemotherapeutic agent cisplatin and its analogs, commonly used aminoglycoside antibiotics, e.g. gentamicin, for the treatment of infections caused by gram-negative bacteria, quinine and its analogs, salicylate and its analogs, and loop-diuretics.

[0171] For example, antibacterial aminoglycosides such as gentamicins, streptomycins, kanamycins, tobramycins, and the like are known to have serious toxicity, particularly ototoxicity and nephrotoxicity, which reduce the value of such antimicrobials as therapeutic agents (see Goodman and Gilman's The Pharmacological Basis of Therapeutics, 6th ed., A. Goodman Gilman et al., eds; Macmillan Publishing Co., Inc., New York, 1980, pp. 1169-71).

[0172] Clearly, ototoxicity is a dose-limiting side-effect of antibiotic administration. Studies have shown that from 4% to 15% of patients receiving 1 gram per day for greater than 1 week develop measurable hearing loss, which slowly becomes worse and can lead to complete permanent deafness if treatment continues.

[0173] Nephrotoxicity and ototoxicity are serious dose-limiting side-effect for cisplatin, a platinum coordination complex, that has proven effective on a variety of human cancers including testicular, ovarian, bladder, and head and neck cancer. Cisplatin (Platinol®) damages auditory and vestibular systems. Salicylates, such as aspirin, are the most commonly used therapeutic drugs for their anti-inflammatory, analgesic, anti-pyretic and anti-thrombotic effects. Unfortunately, they too have ototoxic side effects and can lead to tinnitus (“ringing in the ears”) and temporary hearing loss. Moreover, if the drug is used at high doses for a prolonged time, chronic and irreversible hearing impairment can become an issue. Another target organ for cisplatin toxicity is the kidney. This toxicity is manifested by reduced renal function and leads to serum electrolyte changes and pathological changes in the urine analysis. Doses of cisplatin, which produce changes in renal function may cause no histopathological changes. Higher doses of the drug lead to terstitial nephritis. Cisplatin also causes bone marrow hypoplasia, and can cause autonomic neuropathy. Slight changes in liver function and histopathology are also observed following cisplatin therapy.

[0174] Without being bound by theory, it is believed that cisplatin drugs and other potentially ototoxic drugs (such as aminoglycoside antibiotics) may induce the ototoxic effects via programmed cell death or apoptosis in inner ear tissue, particularly inner ear hair cells (Zhang et al., Neuroscience 2003, 120(1):191-205; Wang et al., J. Neuroscience 2003, 23(24):8596-8607). In mammals, auditory hair cells are produced only during embryonic development and do not regenerate if lost during postnatal life, therefore, a loss of hair cells will result in profound and irreversible deafness. Unfortunately, at present, there are no effective therapies to treat the cochlea and reverse this condition. Thus, an effective therapy to prevent cell death of auditory hair cells would be of great therapeutic value.

[0175] Another type of hearing loss is presbycusis, which is age related hearing loss. It is estimated that about 30-35 percent of adults between the ages of 65 and 75 years and about 40-50 percent of people aged 75 and older have hearing loss. Accordingly, there exists a need for means to prevent, reduce or treat the incidence and/or severity of inner ear disorders and hearing impairments involving inner ear tissue, particularly inner ear hair cells.

[0176] By “exposure to an toxic agent” is meant that the toxic agent is made available to, or comes into contact with, a mammal. A toxic agent can be toxic to one or more organs in the body, for example, the ear, kidney, nervous system, liver and the like. Exposure to an toxic agent can occur by direct administration, e.g., by ingestion or administration of a food, medicinal, or therapeutic agent, e.g., a chemotherapeutic agent, by accidental contamination, or by environmental exposure, e.g., aerial or aqueous exposure.

[0177] Hearing loss relevant to the invention may be due to end-organ lesions involving inner ear hair cells, e.g., acoustic trauma, viral endolymphatic labyrinthitis, Meniere's disease. Hearing impairments include tinnitus, which is a perception of sound in the absence of an acoustic stimulus, and may be intermittent or continuous, wherein there is diagnosed a sensorineural loss. Hearing loss may be due to bacterial or viral infection, such as in herpes zoster oticus, purulent labyrinthitis arising from acute otitis media, purulent meningitis, chronic otitis media, sudden deafness including that of viral origin, e.g., viral endolymphatic labyrinthitis caused by viruses including mumps, measles, influenza, chicken pox, mononucleosis and adenoviruses. The hearing loss can be congenital, such as that caused by rubella, anoxia during birth, bleeding into the inner ear due to trauma during delivery, ototoxic drugs administered to the mother, erythroblastosis fetalis, and hereditary conditions including Waardenburg's syndrome and Hurler's syndrome.

[0178] The hearing loss can be noise-induced, generally due to a noise, greater than about 85 decibels (db) that damages the inner ear. In a particular aspect of the invention, the hearing loss is caused by an ototoxic drug that effects the auditory portion of the inner ear, particularly inner ear hair cells. Incorporated herein by reference are chapters 196, 197, 198 and 199 of The Merck Manual of Diagnosis and Therapy, 14th Edition, (1982), Merck Sharp & Dome Research Laboratories, N.J. and corresponding chapters in the most recent 16th edition, including Chapters 207 and 210 relating to description and diagnosis of hearing and balance impairments.

[0179] It is the object of the present invention to provide a method and compositions for treating a mammal, to prevent, reduce, or treat a hearing impairment, disorder or imbalance, preferably an ototoxin-induced hearing condition, by administering to a mammal in need of such treatment a composition of the invention. One embodiment of the invention is a method for treating a hearing disorder or impairment wherein the ototoxicity results from administration of a therapeutically effective amount of an ototoxic pharmaceutical drug. Typical ototoxic drugs are chemotherapeutic agents, e.g. antineoplastic agents, and antibiotics. Other possible candidates include loop-diuretics, quinines or a quinine-like compound, and salicylate or salicylate-like compounds.

[0180] Ototoxic aminoglycoside antibiotics include but are not limited to neomycin, paromomycin, ribostamycin, lividomycin, kanamycin, amikacin, tobramycin, viomycin, gentamicin, sisomicin, netilmicin, streptomycin, dibekacin, fortimicin, and dihydrostreptomycin, or combinations thereof. Particular antibiotics include neomycin B, kanamycin A, kanamycin B, gentamicin C1, gentamicin C1a, and gentamicin C2.

[0181] Ototoxic chemotherapeutic agents amenable to the methods of the invention include, but are not limited to an antineoplastic agent, including cisplatin or cisplatin-like compounds, taxol or taxol-like compounds, and other chemotherapeutic agents believed to cause ototoxin-induced hearing impairments, e.g., vincristine, an antineoplastic drug used to treat hematological malignancies and sarcomas. Cisplatin-like compounds include carboplatin (Paraplatin®), tetraplatin, oxaliplatin, aroplatin and transplatin inter alia.

[0182] The methods and compositions of the present invention are also effective in the treatment of acoustic trauma or mechanical trauma, preferably acoustic or mechanical trauma that leads to inner ear hair cell loss. Acoustic trauma to be treated in the present invention may be caused by a single exposure to an extremely loud sound, or following long-term exposure to everyday loud sounds above 85 decibels. Mechanical inner ear trauma to be treated in the present invention is for example the inner ear trauma following insertion and operation of an electronic device in the inner ear. The compositions of the present invention prevent or minimize the damage to inner ear hair cells associated with the device.

[0183] In some embodiments the composition of the invention is co-administered with an ototoxin. For example, the present invention provides an improved method for treatment of infection of a mammal receiving an antibiotic for treatment of the infection, comprising administering a therapeutically effective amount of one or more compounds (particularly novel siRNAs) which down-regulate expression of the mammalian NOX4 gene, to the patient in need of such treatment to reduce or prevent ototoxin-induced hearing impairment associated with the antibiotic. The compounds which down-regulate expression of a NOX gene, in particular novel NOX4 siRNA compounds are preferably administered locally within the inner ear.

[0184] In yet another embodiment an improved method for treatment of cancer in a mammal by administration of a chemotherapeutic compound is provided, wherein the improvement comprises administering a therapeutically effective amount of a composition of the invention to the patient in need of such treatment to reduce or prevent ototoxin-induced hearing impairment associated with the chemotherapeutic drug. The compounds which reduce or prevent the ototoxin-induced hearing impairment, eg. the novel siRNAs inter alia are preferably administered locally within the inner ear.

[0185] In another embodiment the methods of treatment are applied to treatment of hearing loss resulting from the administration of a chemotherapeutic agent in order to treat its ototoxic side-effect.

[0186] In another embodiment the methods of the invention are applied to hearing impairments resulting from the administration of quinine and its synthetic substitutes, typically used in the treatment of malaria, to treat its ototoxic side-effect.

[0187] In another embodiment the methods of the invention are applied to hearing impairments resulting from administration of a diuretic to treat its ototoxic side-effect. Diuretics, particularly “loop” diuretics, i.e. those that act primarily in the Loop of Henle, are candidate ototoxins. Illustrative examples, not limiting to the invention method, include furosemide, ethacrylic acid, and mercurials. Diuretics are typically used to prevent or eliminate edema. Diuretics are also used in nonedematous states for example hypertension, hypercalcemia, idiopathic hypercalciuria, and nephrogenic diabetes insipidus.

[0188] In another preferred embodiment, the compounds of the invention are used for treating acute renal failure, in particular acute renal failure due to ischemia in post surgical patients, and acute renal failure due to chemotherapy treatment such as cisplatin administration or sepsis-associated acute renal failure. A preferred use of the compounds of the invention is for the prevention of acute renal failure in high-risk patients undergoing major cardiac surgery or vascular surgery. The patients at high-risk of developing acute renal failure can be identified using various scoring methods such as the Cleveland Clinic algorithm or that developed by US Academic Hospitals (QMMI) and by Veterans' Administration (CICSS). Other preferred uses of the compounds of the invention are for the prevention of ischemic acute renal failure in kidney transplant patients or for the prevention of toxic ARF in patients receiving chemotherapy.

[0189] In another preferred embodiment, the compounds of the invention are used for treating ocular diseases (e.g. glaucoma, ocular ischemic conditions and dry eye syndrome).

[0190] In other embodiments the compounds and methods of the invention are useful for treating or preventing the incidence or severity of various diseases and conditions in a patient, in particular conditions which are result from ischemic/reperfusion injury or oxidative stress, Acute Respiratory Distress Syndrome (ARDS) for example due to coronavirus infection or endotoxins, severe acute respiratory syndrome (SARS), and other acute lung injuries, ischemia reperfusion injury associated with lung transplantation, glaucoma, spinal cord injury, pressure sores, osteoarthritis and Chronic Obstructive Pulmonary Disease (COPD). The methods comprising administering to the patient a composition comprising one or more inhibitors (such as siRNA compounds) which inhibit NOX4 gene in a therapeutically effective dose, thereby treating the patient.

[0191] In other embodiments the compounds and methods of the invention are useful for treating or preventing the incidence or severity of other diseases and conditions in a patient. These diseases and conditions include stroke and stroke-like situations (e.g. cerebral, renal, cardiac failure), neuronal cell death, brain injuries with or without reperfusion, chronic degenerative diseases e.g. neurodegenerative disease including Alzheimer's disease, Huntington's disease, Parkinson's disease, multiple sclerosis, amyotrophic lateral sclerosis, spinobulbar atrophy, prion disease, and apoptosis resulting from traumatic brain injury (TBI).

[0192] The compounds and methods of the invention are directed to providing neuroprotection, cerebroprotection, or to prevent and/or treat cytotoxic T cell and natural killer cell-mediated apoptosis associated with autoimmune disease and transplant rejection, or to prevent cell death of cardiac cells including heart failure, cardiomyopathy, viral infection or bacterial infection of the heart, myocardial ischemia, myocardial infarct, and myocardial ischemia, coronary artery by-pass graft, or to prevent and/or treat mitochondrial drug toxicity e.g. as a result of chemotherapy or HIV therapy, to prevent cell death during viral infection or bacterial infection, or to prevent and/or treat inflammation or inflammatory diseases, inflammatory bowel disease, sepsis and septic shock. Other uses include prevention of cell death from follicle to ovocyte stages, from ovocyte to mature egg stages and sperm (for example, methods of freezing and transplanting ovarian tissue, artificial fertilization), or to preserve fertility in mammals after chemotherapy, in particular human mammals, or to prevent and/or treat, macular degeneration, or to prevent and/or treat acute hepatitis, chronic active hepatitis, hepatitis-B, and hepatitis-C, or to prevent hair loss, (e.g. hair loss due-to male-pattern baldness, or hair loss due to radiation, chemotherapy or emotional stress), or to treat or ameliorate skin damage whereby the skin damage may be due to exposure to high levels of radiation, heat, chemicals, sun, or to burns and autoimmune diseases), or to prevent cell death of bone marrow cells in myelodysplastic syndromes (MDS), or to treat pancreatisis, or to treat, rheumatoid arthritis, psoriasis, glomerulonephritis, atheroscerosis, and graft versus host disease (GVHD), or to treat retinal pericyte apoptosis, retinal damages resulting from ischemia, diabetic retinopathy, or to treat any disease states associated NOX expression, wherein the NOX expression is associated with expression of NOX1, NOX2 (gp91phox, CYBB), NOX4, NOX5, DUOX2, NOXO1, NOXO2, NOXA1 and/or NOXA2 (p67phox).

[0193] The present invention also relates to organ transplantation in general. For organ transplantation, either the donor or the recipient or both may be treated with a compound or composition of the present invention. Accordingly, the present invention relates to a method of treating an organ donor or an organ recipient comprising the step of administering to the organ donor or organ recipient a therapeutically effective amount of a compound according to the present invention.

[0194] The invention further relates to a method for preserving an organ comprising contacting the organ with an effective amount of compound of the present invention. Also provided is a method for reducing or preventing injury (in particular reperfusion injury) of an organ during surgery and/or following removal of the organ from a subject comprising placing the organ in an organ preserving solution wherein the solution comprises a compound according to the present invention.

[0195] The present invention also provides for a process of preparing a pharmaceutical composition, which comprises:
[0196] providing one or more double stranded compound of the invention; and
[0197] admixing said compound with a pharmaceutically acceptable carrier.

[0198] In a preferred embodiment, the compound used in the preparation of a pharmaceutical composition is admixed with a carrier in a pharmaceutically effective dose. In a particular embodiment the compound of the present invention is conjugated to a steroid or to a lipid or to another suitable molecule e.g. to cholesterol.

### Delivery

[0199] The siRNA molecules of the present invention may be delivered to the target tissue by direct application of the naked molecules prepared with a carrier or a diluent.

[0200] The term “naked siRNA” refers to siRNA molecules that are free from any delivery vehicle that acts to assist, promote or facilitate entry into the cell, including viral sequences, viral particles, liposome formulations, lipofectin or precipitating agents and the like. For example, siRNA in PBS is “naked siRNA”.

[0201] However, in some embodiments the siRNA molecules of the invention are delivered in liposome formulations and lipofectin formulations and the like and can be prepared by methods well known to those skilled in the art. Such methods are described, for example, in U.S. Pat. Nos. 5,593,972, 5,589,466, and 5,580,859, which are herein incorporated by reference.

[0202] Delivery systems aimed specifically at the enhanced and improved delivery of siRNA into mammalian cells have been developed (see, for example, Shen et al FEBS Let. 539: 111-114 (2003), Xia et al., Nat. Biotech. 20: 1006-1010 (2002), Reich et al., Mol. Vision. 9: 210-216 (2003), Sorensen et al., J. Mol. Biol. 327: 761-766 (2003), Lewis et al., Nat. Gen. 32: 107-108 (2002) and Simeoni et al., NAR 31, 11: 2717-2724 (2003)). siRNA has recently been successfully used for inhibition of gene expression in primates; for details see for example, Tolentino et al., Retina 24(1) February 2004 I 132-138. Respiratory formulations for siRNA are described in US patent application publication No. 2004/0063654. Cholesterol-conjugated siRNAs (and other steroid and lipid conjugated siRNAs) can been used for delivery (see for example Soutschek et al Nature 432: 173-177(2004) Therapeutic silencing of an endogenous gene by systemic administration of modified siRNAs; and Lorenz et al. Bioorg. Med. Chem. Lett. 14:4975-4977 (2004) Steroid and lipid conjugates of siRNAs to enhance cellular uptake and gene silencing in liver cells.)

[0203] Pharmaceutically acceptable carriers, solvents, diluents, excipients, adjuvants and vehicles as well as implant carriers generally refer to inert, non-toxic solid or liquid fillers, diluents or encapsulating material not reacting with the active ingredients of the invention and they include liposomes and microspheres. Examples of delivery systems useful in the present invention include U.S. Pat. Nos. 5,225,182; 5,169,383; 5,167,616; 4,959,217; 4,925,678; 4,487,603; 4,486,194; 4,447,233; 4,447,224; 4,439,196; and 4,475,196. Many other such implants, delivery systems, and modules are well known to those skilled in the art. In one specific embodiment of this invention topical and transdermal formulations may be selected. The siRNAs or pharmaceutical compositions of the present invention are administered and dosed in accordance with good medical practice, taking into account the clinical condition of the individual patient, the disease to be treated, the site and method of administration, scheduling of administration, patient age, sex, body weight and other factors known to medical practitioners.

[0204] A “therapeutically effective dose” for purposes herein is thus determined by such considerations as are known in the art. The dose must be effective to achieve improvement including but not limited to improved survival rate or more rapid recovery, or improvement or elimination of symptoms and other indicators as are selected as appropriate measures by those skilled in the art.

[0205] In general, the active dose of compound for humans is in the range of from 1 ng/kg to about 100 mg/kg body weight per day, preferably about 0.01 mg to about 2-10 mg/kg body weight per day, in a regimen of one dose per day or twice or three or more times per day for a period of 1-4 weeks or longer.

[0206] The compounds of the present invention can be administered by any of the conventional routes of administration. It should be noted that the compound can be administered as the compound or as pharmaceutically acceptable salt and can be administered alone or as an active ingredient in combination with pharmaceutically acceptable carriers, solvents, diluents, excipients, adjuvants and vehicles. The compounds can be administered orally, subcutaneously or parenterally including intravenous, intraarterial, intramuscular, intraperitoneally, and intranasal administration as well as intrathecal and infusion techniques. Implants of the compounds are also useful. Liquid forms may be prepared for injection, the term including subcutaneous, transdermal, intravenous, intramuscular, intrathecal, and other parental routes of administration. The liquid compositions include aqueous solutions, with and without organic co-solvents, aqueous or oil suspensions, emulsions with edible oils, as well as similar pharmaceutical vehicles. In a particular embodiment, the administration comprises intravenous administration. In another embodiment the administration comprises topical or local administration

[0207] In addition, in certain embodiments the compositions for use in the novel treatments of the present invention may be formed as aerosols, for example for intranasal administration, or oral compositions (such as tablets, suspensions, solutions) for local delivery to the oral cavity.

[0208] The present invention further provides for a pharmaceutical composition comprising two or more siRNA molecules for the treatment of any of the diseases and conditions mentioned herein, whereby said two molecules may be physically mixed together in the pharmaceutical composition in amounts which generate equal or otherwise beneficial activity, or may be covalently or non-covalently bound, or joined together by a nucleic acid linker of a length ranging from 2-100, preferably 2-50 or 2-30 nucleotides. In one embodiment, the siRNA molecules are comprised of a double-stranded nucleic acid structure as described herein, wherein the two siRNA sequences are selected from Tables A-R.

[0209] The siRNA molecules are covalently or non-covalently bound or joined by a linker to form a tandem siRNA molecule. Such tandem siRNA molecules comprising two siRNA sequences are typically of 38-150 nucleotides in length, more preferably 38 or 40-60 nucleotides in length, and longer accordingly if more than two siRNA sequences are included in the tandem molecule. A longer tandem molecule comprised of two or more longer sequences which encode siRNA produced via internal cellular processing, e.g., long dsRNAs, is also envisaged, as is a tandem molecule encoding two or more shRNAs. Such tandem molecules are also considered to be a part of the present invention.

[0210] siRNA molecules that target the NOX gene may be the main active component in a pharmaceutical composition, or may be one active component of a pharmaceutical composition containing two or more siRNAs (or molecules which encode or endogenously produce two or more siRNAs, be it a mixture of molecules or one or more tandem molecules which encode two or more siRNAs), said pharmaceutical composition further being comprised of one or more additional siRNA molecule which targets one or more additional gene. Simultaneous inhibition of said additional gene(s) will likely have an additive or synergistic effect for treatment of the diseases disclosed herein.

[0211] Additionally, the NOX siRNA compounds disclosed herein or any nucleic acid molecule comprising or encoding such siRNA can be linked or bound (covalently or non-covalently) to antibodies (including aptamer molecules) against cell surface internalizable molecules expressed on the target cells, in order to achieve enhanced targeting for treatment of the diseases disclosed herein. For example, anti-Fas antibody (preferably a neutralizing antibody) may be combined (covalently or non-covalently) with NOX siRNA. In another example, an aptamer which can act like a ligand/antibody may be combined (covalently or non-covalently) with any NOX siRNA.

[0212] The compounds of the present invention can be delivered either directly or with viral or non-viral vectors. When delivered directly the sequences are generally rendered nuclease resistant. Alternatively the sequences can be incorporated into expression cassettes or constructs such that the sequence is expressed in the cell as discussed herein below. Generally the construct contains the proper regulatory sequence or promoter to allow the sequence to be expressed in the targeted cell. Vectors optionally used for delivery of the compounds of the present invention are commercially available, and may be modified for the purpose of delivery of the compounds of the present invention by methods known to one of skill in the art.

[0213] It is also envisaged that a long oligonucleotide (typically 25-500 nucleotides in length) comprising one or more stem and loop structures, where stem regions comprise the sequences of the oligonucleotides of the invention, may be delivered in a carrier, preferably a pharmaceutically acceptable carrier, and may be processed intracellularly by endogenous cellular complexes (e.g. by DROSHA and DICER as described above) to produce one or more smaller double stranded oligonucleotides (siRNAs) which are oligonucleotides of the invention. This oligonucleotide can be termed a tandem shRNA construct. It is envisaged that this long oligonucleotide is a single stranded oligonucleotide comprising one or more stem and loop structures, wherein each stem region comprises a sense and corresponding antisense siRNA sequence of the NOX genes of the invention. In particular, it is envisaged that this oligonucleotide comprises sense and antisense siRNA sequences as depicted in Tables A-R.

[0214] Although the inhibitor may be an siRNA molecule, other inhibitors contemplated to be used in the methods of the invention to inhibit a NOX gene and to treat the diseases and conditions described herein are inter alia antibodies, preferably neutralizing antibodies or fragments thereof, including single chain antibodies, antisense oligonucleotides, antisense DNA or RNA molecules, ribozymes, proteins, polypeptides and peptides including peptido-mimetics and dominant negatives, and also expression vectors expressing all the above. Additional inhibitors may be small chemical molecules, which generally have a molecular weight of less than 2000 daltons, more preferably less than 1000 daltons, even more preferably less than 500 daltons. These inhibitors may act as follows: small molecules may affect expression and/or activity; antibodies may affect activity; all kinds of antisense may affect NOX4 gene expression; and dominant negative polypeptides and peptidomimetics may affect activity; expression vectors may be used inter alia for delivery of antisense or dominant-negative polypeptides or antibodies.

### Antibodies

[0215] The term “antibody” refers to IgG, IgM, IgD, IgA, and IgE antibody, inter alia. The definition includes polyclonal antibodies or monoclonal antibodies. This term refers to whole antibodies or fragments of antibodies comprising an antigen-binding domain, e.g. antibodies without the Fc portion, single chain antibodies, miniantibodies, fragments consisting of essentially only the variable, antigen-binding domain of the antibody, etc. The term “antibody” may also refer to antibodies against polynucleotide sequences obtained by cDNA vaccination. The term also encompasses antibody fragments which retain the ability to selectively bind with their antigen or receptor and are exemplified as follows, inter alia:
[0216] (1) Fab, the fragment which contains a monovalent antigen-binding fragment of an antibody molecule which can be produced by digestion of whole antibody with the enzyme papain to yield a light chain and a portion of the heavy chain;
[0217] (2) (Fab′)₂, the fragment of the antibody that can be obtained by treating whole antibody with the enzyme pepsin without subsequent reduction; F(ab′₂) is a dimer of two Fab fragments held together by two disulfide bonds;
[0218] (3) Fv, defined as a genetically engineered fragment containing the variable region of the light chain and the variable region of the heavy chain expressed as two chains; and
[0219] (4) Single chain antibody (SCA), defined as a genetically engineered molecule containing the variable region of the light chain and the variable region of the heavy chain linked by a suitable polypeptide linker as a genetically fused single chain molecule.

### Antisense Molecules

[0220] By the term “antisense” (AS) or “antisense fragment” is meant a polynucleotide fragment (comprising either deoxyribonucleotides, ribonucleotides or a mixture of both) having inhibitory antisense activity, said activity causing a decrease in the expression of the endogenous genomic copy of the corresponding gene. Many reviews have covered the main aspects of antisense (AS) technology and its therapeutic potential (Aboul-Fadl T., Curr Med. Chem. 2005, 12(19):2193-214; Crooke S T, Curr Mol. Med. 2004, 4(5):465-87; Crooke S T, Ann Rev Med. 2004, 55:61-95; Vacek M et al., Cell Mol Life Sci. 2003, 60(5):825-33; Cho-Chung Y S, Arch Pharm Res. 2003, 26(3):183-91. Additional reviews on the chemical (Crooke et al., Hematol Pathol. 1995, 9(2):59-72), cellular (Wagner, Nature. 1994, 372(6504):333-5) and therapeutic (Scanlon, et al, FASEB J. 1995, 9(13):1288-96) aspects of AS technology are available. Antisense intervention in the expression of specific genes can be achieved by the use of modified AS oligonucleotide sequences (for recent reports see Lefebvre-d'Hellencourt et al, 1995; Agrawal, 1996; LevLehman et al, 1997).

[0221] AS oligonucleotide sequences may be short sequences of DNA, typically 15-30 mer but may be as small as 7-mer (Wagner et al, Nat. Biotech. 1996, 14(7):840-4), designed to complement a target mRNA of interest and form an RNA:AS duplex. This duplex formation can prevent processing, splicing, transport or translation of the relevant mRNA. Moreover, certain AS nucleotide sequences can elicit cellular RNase H activity when hybridized with their target mRNA, resulting in mRNA degradation (Calabretta et al, Semin Oncol. 1996, 23(1):78-87). In that case, RNase H will cleave the RNA component of the duplex and can potentially release the AS to further hybridize with additional molecules of the target RNA. An additional mode of action results from the interaction of AS with genomic DNA to form a triple helix which can be transcriptionally inactive.

[0222] The sequence target segment for the antisense oligonucleotide is selected such that the sequence exhibits suitable energy related characteristics important for oligonucleotide duplex formation with their complementary templates, and shows a low potential for self-dimerization or self-complementation (Anazodo et al., 1996, Biochem. Biophys. Res. Comm. 229:305-309). For example, the computer program OLIGO (Primer Analysis Software, Version 3.4), can be used to determine antisense sequence melting temperature, free energy properties, and to estimate potential self-dimer formation and self-complimentary properties. The program allows the determination of a qualitative estimation of these two parameters (potential self-dimer formation and self-complimentary) and provides an indication of “no potential” or “some potential” or “essentially complete potential”. Using this program target segments are generally selected that have estimates of no potential in these parameters. However, segments can be used that have “some potential” in one of the categories. A balance of the parameters is used in the selection as is known in the art. Further, the oligonucleotides are also selected as needed so that analog substitution does not substantially affect function.

[0223] Phosphorothioate antisense oligonucleotides do not normally show significant toxicity at concentrations that are effective and exhibit sufficient pharmacodynamic half-lives in animals (Agrawal, et al., PNAS USA. 1997, 94(6):2620-5) and are nuclease resistant. Antisense oligonucleotide inhibition of basic fibroblast growth factor (bFGF), having mitogenic and angiogenic properties, suppressed 80% of growth in glioma cells (Morrison, J Biol. Chem. 1991 266(2):728-34) in a saturable and specific manner. Being hydrophobic, antisense oligonucleotides interact well with phospholipid membranes (Akhter et al., NAR. 1991, 19:5551-5559). Following their interaction with the cellular plasma membrane, they are actively (or passively) transported into living cells (Loke et al., PNAS1989, 86(10):3474-8), in a saturable mechanism predicted to involve specific receptors (Yakubov et al., PNAS, 1989 86(17):6454-58).

### Ribozymes

[0224] A “ribozyme” is an RNA molecule that possesses RNA catalytic ability (see Cech for review) and cleaves a specific site in a target RNA. In accordance with the present invention, ribozymes which cleave mRNA may be utilized as inhibitors. This may be necessary in cases where antisense therapy is limited by stoichiometric considerations (Sarver et al., 1990, Gene. Regulation and Aids, pp. 305-325). Ribozymes can then be used that will target the a gene associated with a bone marrow disease. The number of RNA molecules that are cleaved by a ribozyme is greater than the number predicted by stochiochemistry. (Hampel and Tritz, Biochem. 1989, 28(12):4929-33; Uhlenbeck, Nature. 1987 328(6131):596-600).

[0225] Ribozymes catalyze the phosphodiester bond cleavage of RNA. Several ribozyme structural families have been identified including Group I introns, RNase P, the hepatitis delta virus ribozyme, hammerhead ribozymes and the hairpin ribozyme originally derived from the negative strand of the tobacco ringspot virus satellite RNA (sTRSV) (U.S. Pat. No. 5,225,347). The latter two families are derived from viroids and virusoids, in which the ribozyme is believed to separate monomers from oligomers created during rolling circle replication (Symons, 1989 and 1992). Hammerhead and hairpin ribozyme motifs are most commonly adapted for trans-cleavage of mRNAs for gene therapy (Sullivan, 1994). In general the ribozyme has a length of from about 30-100 nucleotides. Delivery of ribozymes is similar to that of AS fragments and/or siRNA molecules.

### Screening for NOX Inhibitors

[0226] Some of the compounds and compositions of the present invention may be used in a screening assay for identifying and isolating compounds that modulate the activity of a NOX gene, in particular compounds that modulate a disorder accompanied by an elevated level of a NOX gene. The compounds to be screened comprise inter alia substances such as small chemical molecules and antisense oligonucleotides.

[0227] The inhibitory activity of the compounds of the present invention on a NOX gene or binding of the compounds of the present invention to a NOX gene may be used to determine the interaction of a test compound with the NOX gene, e.g., if the test compound competes with the oligonucleotides of the present invention for inhibition of a NOX gene, or if the additional compound rescues said inhibition. The inhibition or activation can be tested by various means, such as, inter alia, assaying for the product of the activity of the NOX polypeptide or displacement of binding compound from the NOX polypeptide in radioactive or fluorescent competition assays.

[0228] The present invention is illustrated in detail below with reference to Examples, but is not to be construed as being limited thereto.

[0229] Citation of any document herein is not intended as an admission that such document is pertinent prior art, or considered material to the patentability of any claim of the present application. Any statement as to content or a date of any document is based on the information available to applicant at the time of filing and does not constitute an admission as to the correctness of such a statement.

### EXAMPLES

### General Methods in Molecular Biology

[0230] Standard molecular biology techniques known in the art and not specifically described were generally followed as in Sambrook et al., Molecular Cloning: A Laboratory Manual, Cold Spring Harbor Laboratory Press, New York (1989), and as in Ausubel et al., Current Protocols in Molecular Biology, John Wiley and Sons, Baltimore, Md. (1989) and as in Perbal, A Practical Guide to Molecular Cloning, John Wiley & Sons, New York (1988), and as in Watson et al., Recombinant DNA, Scientific American Books, New York and in Birren et al (eds) Genome Analysis: A Laboratory Manual Series, Vols. 1-4 Cold Spring Harbor Laboratory Press, New York (1998) and methodology as set forth in U.S. Pat. Nos. 4,666,828; 4,683,202; 4,801,531; 5,192,659 and 5,272,057 and incorporated herein by reference. Polymerase chain reaction (PCR) was carried out generally as in PCR Protocols: A Guide To Methods And Applications, Academic Press, San Diego, Calif. (1990). In situ PCR in combination with Flow Cytometry can be used for detection of cells containing specific DNA and mRNA sequences (Testoni et al., 1996, Blood 87:3822.) Methods of performing RT-PCR are also well known in the art.

### Example 1

### In Vitro Testing of the siRNA Compounds for NOX Genes

### 1. General

[0231] About 1.5-2×10⁵ tested cells (HeLa cells or 293T cells for siRNA targeted the human gene and NRK52 cells or NMUMG cells for siRNA targeted the rat/mouse gene) were seeded per well in 6 wells plate (70-80% confluent).

[0232] At 24 h subsequently, cells were transfected with siRNA compounds using Lipofectamine® 2000 reagent (Invitrogene) at final concentration of 500 μM, 5 nM, 20 nM or 40 nM. The cells were incubated at 37° C. in a CO2 incubator for 72 h.

[0233] As positive control for cells transfection PTEN-Cy3 labeled siRNA compounds were used. As negative control for siRNA activity GFP siRNA compounds were used.

[0234] At 72 h after transfection cells were harvested and RNA was extracted from cells. Transfection efficiency was tested by fluorescent microscopy.

[0235] Results: The percent of inhibition of gene expression using specific preferred siRNAs was determined using qPCR analysis of target gene in cells expressing the endogenous gene. The data demonstrate the percent of knockdown of the expression of the target gene in cells. In general, the siRNAs having specific sequences that were selected for in vitro testing were specific for both human and the rat/rabbit genes. Similar results of reduced expression of specific genes are obtained with other siRNAs, the sequences of which are listed in Tables A-R.

### Example 2

### Model Systems of Acute Renal Failure (ARF)

[0236] ARF is a clinical syndrome characterized by rapid deterioration of renal function that occurs within days. Without being bound by theory acute kidney injury may be the result of renal ischemia-reperfusion injury such as renal ischemia-reperfusion injury in patients undergoing major surgery such as major cardiac surgery. The principal feature of ARF is an abrupt decline in glomerular filtration rate (GFR), resulting in the retention of nitrogenous wastes (urea, creatinine). Recent studies, support that apoptosis in renal tissues is prominent in most human cases of ARF. The principal site of apoptotic cell death is the distal nephron. During the initial phase of ischemic injury, loss of integrity of the actin cytoskeleton leads to flattening of the epithelium, with loss of the brush border, loss of focal cell contacts, and subsequent disengagement of the cell from the underlying substratum.

[0237] Testing the active siRNA for each NOX gene separately for treating ARF is done using an animal model for ischemia-reperfusion-induced ARF.

### Ischemia-Reperfusion Induced ARF

[0238] Ischemia-reperfusion injury is induced in rats following 45 minutes bilateral kidney arterial clamp and subsequent release of the clamp to allow 24 hours of reperfusion. Twelve mg/kg of siRNA to a specific NOX gene are injected into the jugular vein 30 minutes prior to and 4 hours following the clamp. ARF progression is monitored by measurement of serum creatinine levels before (baseline) and 24 hrs post surgery. At the end of the experiment, the rats are perfused via an indwelling femoral line with warm PBS followed by 4% paraformaldehyde. The left kidneys are removed and stored in 4% paraformaldehyde for subsequent histological analysis. Acute renal failure is frequently defined as an acute increase of the serum creatinine level from baseline. An increase of at least 0.5 mg per dL or 44.2 μmol per L of serum creatinine is considered as an indication for acute renal failure. Serum creatinine is measured at time zero before the surgery and at 24 hours post ARF surgery. The results show that siRNA to each specific NOX gene described herein prevents production of acute renal failure in this model.

### Example 3

### Model Systems of Pressure Sores or Pressure Ulcers

[0239] Pressure sores or pressure ulcers including diabetic ulcers, are areas of damaged skin and tissue that develop when sustained pressure (usually from a bed or wheelchair) cuts off circulation to vulnerable parts of the body, especially the skin on the buttocks, hips and heels. The lack of adequate blood flow leads to ischemic necrosis and ulceration of the affected tissue. Pressure sores occur most often in patients with diminished or absent sensation or who are debilitated, emaciated, paralyzed, or long bedridden. Tissues over the sacrum, ischia, greater trochanters, external malleoli, and heels are especially susceptible; other sites may be involved depending on the patient's situation.

[0240] Testing the active inhibitors of the invention (such as siRNA) for treating pressure sore, ulcers and similar wounds is performed in the mouse model described in Reid et al., Cyclical Magnetic Pressure Necrosis: A Novel Murine Model of Cutaneous Ischemia-Reperfusion Injury. J Surgical Research 2004, 116: 172-180.

[0241] Additionally, rabbit models described by Mustoe et al, JCI, 1991; Ahn & Mustoe, Ann PI Surg, 1991 and is used for testing the siRNAs of the invention.

### Example 4

### Model Systems of Chronic Obstructive Pulmonary Disease (COPD)

[0242] Chronic obstructive pulmonary disease (COPD) is characterized mainly by emphysema, which is permanent destruction of peripheral air spaces, distal to terminal bronchioles.

[0243] Emphysema is also characterized by accumulation of inflammatory cells such as macrophages and neutrophils in bronchioles and alveolar structures. Emphysema and chronic bronchitis may occur as part of COPD or independently.

[0244] Testing the active inhibitors of the invention (such as siRNA) for treating COPD/emphysema/chronic bronchitis is done in the following animal models:

[0245] Cigarette smoke-induced emphysema model: chronic exposure to cigarette smoke causes emphysema in several animals such as, inter alia, mouse, guinea pig.

[0246] Lung protease activity as a trigger of emphysema.

[0247] VEGFR inhibition model of emphysema.
[0248] Bronchial instillation with human neutrophil/pancreatic elastase in rodents.

[0249] MMP (matrix metalloprotease)-induced emphysema.

[0250] Inflammation-induced emphysema.

[0251] These models are described in co-assigned PCT patent application WO 2006/023544, which is hereby incorporated by reference into this application. The siRNAs of the invention prevent formation of emphysema.

### Example 5

### Model Systems of Spinal Cord Injury

[0252] Spinal cord injury, or myelopathy, is a disturbance of the spinal cord that results in loss of sensation and/or mobility. The two common types of spinal cord injury are due to trauma and disease. Traumatic injury can be due to automobile accidents, falls, gunshot, diving accidents inter alia, and diseases which can affect the spinal cord include polio, spina bifida, tumors and Friedreich's ataxia.

[0253] Testing the active inhibitors of the invention (such as siRNA) for treating spinal cord injury is done in the rat spinal cord contusion model as described by Young (Prog Brain Res. 2002; 137:231-55). Other predictive animal models of spinal cord injury are described in the following references:

[0254] Gruner J Neurotrauma. 1992. 9(2): 123; Hasegawa and Grumet J Neurosurg 2003. 98(5): 1065-71; and Huang and Young J Neurotrauma 1994, 11(5): 547.

### Example 6

### Model Systems of Glaucoma

[0255] Testing the active inhibitors of the invention (such as siRNA) for treating or preventing glaucoma is done in the animal model for example as described by Pease et al. J. Glaucoma 2006, 15(6):512-9.

### Example 7

### Model Systems of Ischemia Reperfusion Injury Following Lung Transplantation in Rats

[0256] Testing the active inhibitors of the invention (such as siRNA) for treating or preventing ischemia reperfusion (IR) injury following lung transplantation is performed in an animal model as described, for example, by Mizobuchi et al. J. Heart Lung Transplant 2004:23:889-93.

### Example 8

### Model systems of Acute Respiratory Distress Syndrome

[0257] Testing the active inhibitors of the invention (such as siRNA) for treating Acute respiratory distress syndrome is performed in an animal model as described, for example, by Chen et al. J Biomed Sci. 2003; 10(6 Pt 1):588-92.

### Example 9

### Model Systems of Hearing Loss Conditions

[0258] (i) Distribution of Cy3-PTEN siRNA in the Cochlea Following Local Application to the Round Window of the Ear:

[0259] A solution of 1 μg/100 μl of Cy3-PTEN siRNA (total of 0.3-0.4 μg) PBS was applied to the round window of chinchillas. The Cy3-labelled cells within the treated cochlea were analyzed 24-48 hours post siRNA round window application after sacrifice of the chinchillas. The pattern of labeling within the cochlea was similar following 24 h and 48 h and includes labeling in the basal turn of cochlea, in the middle turn of cochlea and in the apical turn of cochlea. Application of Cy3-PTEN siRNA onto scala tympani revealed labelling mainly in the basal turn of the cochlea and the middle turn of the cochlea. The Cy3 signal is persistent to up to 15 days after the application of the Cy3-PTEN siRNA. These results indicate for the first time that local application of siRNA molecules within the round window leads to significant penetration of the siRNA molecules to the basal, middle and apical turns of the cochlea. The active siRNAs of the invention are tested in this model.

### (ii) Animal Model of Carboplatin-Induced or Cisplatin-Induced Hair Cell Death in the Cochlea of Chinchilla:

[0260] Chinchillas are pre-treated by direct administration of siRNA of the invention in saline to the left ear of each animal. Saline is given to the right ear of each animal as placebo. Two days following the administration of the specific siRNA, the animals are treated with carboplatin (75 mg/kg ip) or cisplatin (intraperitoneal infusion of 13 mg/kg over 30 minutes). After sacrifice of the chinchillas (two weeks post carboplatin treatment) the % of dead cells of inner hair cells (IHC) and outer hair cells (OHC) is calculated in the left ear (siRNA treated) and in the right ear (saline treated). The results show that the siRNA prevents cell death of inner hair cells.

(iii) Animal Model of Acoustic-Induced Hair Cell Death in the Cochlea of Chinchilla:

[0261] The activity of specific siRNA to each NOX gene described herein is studied in an acoustic trauma model in chinchilla. The animals are exposed to an octave band of noise centered at 4 kHz for 2.5 h at 105 dB. The left ear of the noise-exposed chinchillas is pre-treated (48 h before the acoustic trauma) with 30 μg of siRNA in ˜10 μL of saline; the right ear is pre-treated with vehicle (saline). The compound action potential (CAP) is a convenient and reliable electrophysiological method for measuring the neural activity transmitted from the cochlea. The CAP is recorded by placing an electrode near the base of the cochlea in order to detect the local field potential that is generated when a sound stimulus, such as click or tone burst, is abruptly turned on. The functional status of each ear is assessed 2.5 weeks after the acoustic trauma. Specifically, the mean threshold of the compound action potential recorded from the round window is determined 2.5 weeks after the acoustic trauma in order to determine if the thresholds in the siRNA-treated ear are lower (better) than the untreated (saline) ear. In addition, the amount of inner and outer hair cell loss is determined in the siRNA-treated and the control ear.

[0262] The results show that in the siRNA-treated ear there is less cell death of inner and outer hair cells compared to the control ear.

### Example 10

### Generation of Sequences for Active siRNA Compounds to the NOX Genes and Production of the siRNAs

[0263] Using proprietary algorithms and the known sequence of each NOX gene, the sequences of potential siRNAs were generated. Tables A and B show NOX4 19-mer and 21-mer siRNAs, respectively, as 5′-3′ sequences, which are prioritized based on their score in the proprietary algorithm as the best sequences for targeting the human gene expression. A list of preferred siRNA to NOX1 is provided in tables C and D, infra. A list of preferred siRNA to NOX2 is provided in tables E and F, infra. A list of preferred siRNA to NOX5 is provided in tables G and H, infra. A list of preferred siRNA to DUOX2 is provided in tables I and J, infra. A list of preferred siRNA to NOXO1 is provided in tables K and L infra. A list of preferred siRNA to NOXO2 is provided in tables M and N, infra. A list of preferred siRNA to NOXA1 is provided in tables 0 and P H, infra. A list of preferred siRNA to NOXA2 (p67phox) is provided in tables Q and R, infra.

[0264] The siRNAs used in the experiments described herein are all 19-mers, having alternating ribonucleotides modified in both the antisense and the sense strands of the compound. The modification is such that a 2′-O-methyl (Me) group is present on the first, third, fifth, seventh, ninth, eleventh, thirteenth, fifteenth, seventeenth and nineteenth nucleotide of the antisense strand, whereby the very same modification, i.e. a 2′-O-Me group, is present at the second, fourth, sixth, eighth, tenth, twelfth, fourteenth, sixteenth and eighteenth nucleotide of the sense strand. These particular siRNA compounds are also blunt ended and are non-phosphorylated at the termini; however, comparative experiments have shown that siRNAs phosphorylated at the 3′-termini have similar activity to non-phosphorylated siRNAs in vivo.

1. A double-stranded siRNA compound having structure (A) set forth below:

| | |
|---|---|
| (A) | |
| 5′ (N)ₓ-Z | 3′ (antisense strand) |
| 3′ Z′-(N′)_{y} | 5′ (sense strand) |

wherein each of N and N′ is a nucleotide selected from an unmodified ribonucleotide, a modified ribonucleotide, an unmodified deoxyribonucleotide and a modified deoxyribonucleotide;
wherein each of N and N′ is a nucleotide which may be modified or unmodified in its sugar residue;
wherein each of (N)ₓ and (N′)_{y} is an oligonucleotide in which each consecutive N or N′ is joined to the next N or N′ by a covalent bond;
wherein each of x and y is an integer between 18 and 40;
wherein each of Z and Z′ may be present or absent, but if present is 1-5 consecutive nucleotides covalently attached at the 3′ terminus of the strand in which it is present; and
wherein the sequence of (N)ₓ comprises an antisense sequence to an mRNA transcribed from mammalian gene selected from the group consisting of NOX4, NOX1, NOX2 (gp91phox, CYBB), NOX5, DUOX2, NOXO1, NOXO2, NOXA1 and NOXA2 (p67phox).

2. The compound of claim 1, wherein the sequence of (N)ₓ comprises an antisense sequence present in any one of Tables A-R.

3. The compound of claim 1, wherein the covalent bond is a phosphodiester bond.

4. The compound of claim 1, wherein x=y.

5. (canceled)

6. The compound of claim 4, wherein x=y=19.

7. The compound of claim 1, wherein Z and Z′ are both absent.

8. The compound of claim 1, wherein one of Z or Z′ is present.

9. The compound of claim 1, wherein all of the ribonucleotides are unmodified in their sugar residues.

10. The compound of claim 1, wherein at least one ribonucleotide is modified in its sugar residue.

11. The compound of claim 10, wherein the modification of the sugar residue comprises a modification at the 2′ position.

12. The compound of claim 11, wherein the modification at the 2′ position results in the presence of a moiety selected from the group consisting of an amino, a fluoro, a methoxy, an alkoxy and an alkyl group.

13. The compound of claim 12, wherein the moiety at the 2′ position is methoxy (2′-O-methyl).

14. The compound of claim 1, wherein alternating ribonucleotides are modified in both the antisense and the sense strands.

15. The compound according to claim 14 wherein the middle ribonucleotide in the antisense strand is unmodified.

16. The compound of claim 14, wherein the ribonucleotides at the 5′ and 3′ termini of the antisense strand are modified in their sugar residues, and the ribonucleotides at the 5′ and 3′ termini of the sense strand are unmodified in their sugar residues.

17. The compound of claim 14, wherein the antisense and the sense strands are non-phosphorylated at the 3′ and 5′ termini or wherein the antisense and the sense strands are phosphorylated at the 3′ termini.

18. The compound of claim 1, wherein at least one modified ribonucleotide is selected from a locked ribonucleotide, a morpholino, a peptide ribonucleotide and a mirror ribonucleotide.

19-20. (canceled)

21. A pharmaceutical composition comprising one or more compound of claim 1 in an amount effective to inhibit gene expression of a gene selected from the group consisting of NOX4, NOX1, NOX2 (gp91phox, CYBB), NOX5, DUOX2, NOXO1, NOXO2, NOXA1 and NOXA2 (p67phox); and a pharmaceutically acceptable carrier.

22. A method of treating a subject in need of treatment for a disease or condition selected from hearing loss, acute renal failure, nephritis, ocular disease, Acute Respiratory Distress Syndrome and other acute lung injuries, lung transplantation, spinal cord injury, pressure sores, osteoarthritis and Chronic Obstructive Pulmonary Disease (COPD), comprising administering to the subject a compound according to claim 1 in an amount effective to treat the disease or condition.

23-28. (canceled)

29. The method of claim 22 wherein the disease or disorder is selected from COPD, Acute Respiratory Distress Syndrome or acute lung injury.

30. (canceled)

31. A method of treating an organ recipient comprising the step of administering to the organ recipient a therapeutically effective amount of a compound according to claim 1.

32. The method of claim 31 wherein the organ recipient is undergoing lung transplantation.

The application's sequence listing, which the Patent Office published only in electronic form, follows.

SEQUENCE LISTING (17352 sequences)

SEQ ID NO: 1 - DNA, 1737 bp, Homo sapiens
atggctgtgtcctggaggagctggctcgccaacgaaggggttaaacacctctgcctgttcatctggctctccatgaatgtcctgcttttctggaaaaccttcttgctgtataaccaagggccagagtatcactacctccaccagatgttggggctaggattgtgtctaagcagagcctcagcatctgttcttaacctcaactgcagccttatccttttacccatgtgccgaacactcttggcttacctccgaggatcacagaaggttccaagcaggagaaccaggagattgttggataaaagcagaacattccatattacctgtggtgttactatctgtattttctcaggcgtgcatgtggctgcccatctggtgaatgccctcaacttctcagtgaattacagtgaagactttgttgaactgaatgcagcaagataccgagatgaggatcctagaaaacttctcttcacaactgttcctggcctgacaggggtctgcatggtggtggtgctattcctcatgatcacagcctctacatatgcaataagagtttctaactatgatatcttctggtatactcataacctcttctttgtcttctacatgctgctgacgttgcatgtttcaggagggctgctgaagtatcaaactaatttagatacccaccctcccggctgcatcagtcttaaccgaaccagctctcagaatatttccttaccagagtatttctcagaacattttcatgaacctttccctgaaggattttcaaaaccggcagagtttacccagcacaaatttgtgaagatttgtatggaagagcccagattccaagctaattttccacagacttggctttggatttctggacctttgtgcctgtactgtgccgaaagactttacaggtatatccggagcaataagccagtcaccatcatttcggtcataagtcatccctcagatgtcatggaaatccgaatggtcaaagaaaattttaaagcaagacctggtcagtatattactctacattgtcccagtgtatctgcattagaaaatcatccatttaccctcacaatgtgtccaactgaaaccaaagcaacatttggggttcatcttaaaatagtaggagactggacagaacgatttcgagatttactactgcctccatctagtcaagactccgaaattctgcccttcattcaatctagaaattatcccaagctgtatattgatggtccttttggaagtccatttgaggaatcactgaactatgaggtcagcctctgcgtggctggaggcattggagtaactccatttgcatcaatactcaacaccctgttggatgactggaaaccatacaagcttagaagactatactttatttgggtatgcagagatatccagtccttccgttggtttgcagatttactctgtatgttgcataacaagttttggcaagagaacagacctgactatgtcaacatccagctgtacctcagtcaaacagatgggatacagaagataattggagaaaaatatcatgcactgaattcaagactgtttataggacgtcctcggtggaaacttttgtttgatgaaatagcaaaatataacagaggaaaaacagttggtgttttctgttgtggacccaattcactatccaagactcttcataaactgagtaaccagaacaactcatatgggacaagatttgaatacaataaagagtctttcagctga

SEQ ID NO: 2 - DNA, 1695 bp, Homo sapiens
atgggaaactgggtggttaaccactggttttcagttttgtttctggttgtttggttagggctgaatgttttcctgtttgtggatgccttcctgaaatatgagaaggccgacaaatactactacacaagaaaaatccttgggtcaacattggcctgtgcccgagcgtctgctctctgcttgaattttaacagcacgctgatcctgcttcctgtgtgtcgcaatctgctgtccttcctgaggggcacctgctcattttgcagccgcacactgagaaagcaattggatcacaacctcaccttccacaagctggtggcctatatgatctgcctacatacagctattcacatcattgcacacctgtttaactttgactgctatagcagaagccgacaggccacagatggctcccttgcctccattctctccagcctatctcatgatgagaaaaaggggggttcttggctaaatcccatccagtcccgaaacacgacagtggagtatgtgacattcaccagcgttgctggtctcactggagtgatcatgacaatagccttgattctcatggtaacttcagctactgagttcatccggaggagttattttgaagtcttctggtatactcaccacctttttatcttctatatccttggcttagggattcacggcattggtggaattgtccggggtcaaacagaggagagcatgaatgagagtcatcctcgcaagtgtgcagagtcttttgagatgtgggatgatcgtgactcccactgtaggcgccctaagtttgaagggcatccccctgagtcttggaagtggatccttgcaccggtcattctttatatctgtgaaaggatcctccggttttaccgctcccagcagaaggttgtgattaccaaggttgttatgcacccatccaaagttttggaattgcagatgaacaagcgtggcttcagcatggaagtggggcagtatatctttgttaattgcccctcaatctctctcctggaatggcatccttttactttgacctctgctccagaggaagatttcttctccattcatatccgagcagcaggggactggacagaaaatctcataagggctttcgaacaacaatattcaccaattcccaggattgaagtggatggtccctttggcacagccagtgaggatgttttccagtatgaagtggctgtgctggttggagcaggaattggggtcaccccctttgcttctatcttgaaatccatctggtacaaattccagtgtgcagaccacaacctcaaaacaaaaaagatctatttctactggatctgcagggagacaggtgccttttcctggttcaacaacctgttgacttccctggaacaggagatggaggaattaggcaaagtgggttttctaaactaccgtctcttcctcaccggatgggacagcaatattgttggtcatgcagcattaaactttgacaaggccactgacatcgtgacaggtctgaaacagaaaacctcctttgggagaccaatgtgggacaatgagttttctacaatagctacctcccaccccaagtctgtagtgggagttttcttatgtggccctcggactttggcaaagagcctgcgcaaatgctgtcaccgatattccagtctggatcctagaaaggttcaattctacttcaacaaagaaaatttttga

SEQ ID NO: 3 - DNA, 1548 bp, Homo sapiens
atgggaaactgggtggttaaccactggttttcagttttgtttctggttgtttggttagggctgaatgttttcctgtttgtggatgccttcctgaaatatgagaaggccgacaaatactactacacaagaaaaatccttgggtcaacattggcctgtgcccgagcgtctgctctctgcttgaattttaacagcacgctgatcctgcttcctgtgtgtcgcaatctgctgtccttcctgaggggcacctgctcattttgcagccgcacactgagaaagcaattggatcacaacctcaccttccacaagctggtggcctatatgatctgcctacatacagctattcacatcattgcacacctgtttaactttgactgctatagcagaagccgacaggccacagatggctcccttgcctccattctctccagcctatctcatgatgagaaaaaggggggttcttggctaaatcccatccagtcccgaaacacgacagtggagtatgtgacattcaccagcattgctggtctcactggagtgatcatgacaatagccttgattctcatggtaacttcagctactgagttcatccggaggagttattttgaagtcttctggtatactcaccacctttttatcttctatatccttggcttagggattcacggcattggtggaattgtccggggtcaaacagaggagagcatgaatgagagtcatcctcgcaagtgtgcagagtcttttgagatgtgggatgatcgtgactcccactgtaggcgccctaagtttgaagggcatccccctgagtcttggaagtggatccttgcaccggtcattctttatatctgtgaaaggatcctccggttttaccgctcccagcagaaggttgtgattaccaaggttgttatgcacccatccaaagttttggaattgcagatgaacaagcgtggcttcagcatggaagtggggcagtatatctttgttaattgcccctcaatctctctcctggaatggcatccttttactttgacctctgctccagaggaagatttcttctccattcatatccgagcagcaggggactggacagaaaatctcataagggctttcgaacaacaatattcaccaattcccaggattgaagtggatggtccctttggcacagccagtgaggatgttttccagtatgaagtggctgtgctggttggagcaggaattggggtcaccccctttgcttctatcttgaaatccatctggtacaaattccagtgtgcagaccacaacctcaaaacaaaaaaggttggtcatgcagcattaaactttgacaaggccactgacatcgtgacaggtctgaaacagaaaacctcctttgggagaccaatgtgggacaatgagttttctacaatagctacctcccaccccaagtctgtagtgggagttttcttatgtggccctcggactttggcaaagagcctgcgcaaatgctgtcaccgatattccagtctggatcctagaaaggttcaattctacttcaacaaagaaaatttttga

SEQ ID NO: 4 - DNA, 1713 bp, Homo sapiens
atggggaactgggctgtgaatgaggggctctccatttttgtcattctggtttggctggggttgaacgtcttcctctttgtctggtattaccgggtttatgatattccacctaagttcttttacacaagaaaacttcttgggtcagcactggcactggccagggcccctgcagcctgcctgaatttcaactgcatgctgattctcttgccagtctgtcgaaatctgctgtccttcctcaggggttccagtgcgtgctgctcaacaagagttcgaagacaactggacaggaatctcacctttcataaaatggtggcatggatgattgcacttcactctgcgattcacaccattgcacatctatttaatgtggaatggtgtgtgaatgcccgagtcaataattctgatccttattcagtagcactctctgaacttggagacaggcaaaatgaaagttatctcaattttgctcgaaagagaataaagaaccctgaaggaggcctgtacctggctgtgaccctgttggcaggcatcactggagttgtcatcacgctgtgcctcatattaattatcacttcctccaccaaaaccatccggaggtcttactttgaagtcttttggtacacacatcatctctttgtgatcttcttcattggccttgccatccatggagctgaacgaattgtacgtgggcagaccgcagagagtttggctgtgcataatataacagtttgtgaacaaaaaatctcagaatggggaaaaataaaggaatgcccaatccctcagtttgctggaaaccctcctatgacttggaaatggatagtgggtcccatgtttctgtatctctgtgagaggttggtgcggttttggcgatctcaacagaaggtggtcatcaccaaggtggtcactcaccctttcaaaaccatcgagctacagatgaagaagaaggggttcaaaatggaagtgggacaatacatttttgtcaagtgcccaaaggtgtccaagctggagtggcacccttttacactgacatccgcccctgaggaagacttctttagtatccatatccgcatcgttggggactggacagaggggctgttcaatgcttgtggctgtgataagcaggagtttcaagatgcgtggaaactacctaagatagcggttgatgggccctttggcactgccagtgaagatgtgttcagctatgaggtggtgatgttagtgggagcagggattggggtcacacccttcgcatccattctcaagtcagtctggtacaaatattgcaataacgccaccaatctgaagctcaaaaagatctacttctactggctgtgccgggacacacatgcctttgagtggtttgcagatctgctgcaactgctggagagccagatgcaggaaaggaacaatgccggcttcctcagctacaacatctacctcactggctgggatgagtctcaggccaatcactttgctgtgcaccatgatgaggagaaagatgtgatcacaggcctgaaacaaaagactttgtatggacggcccaactgggataatgaattcaagacaattgcaagtcaacaccctaataccagaataggagttttcctctgtggacctgaagccttggctgaaaccctgagtaaacaaagcatctccaactctgagtctggccctcggggagtgcatttcattttcaacaaggaaaacttctaa

SEQ ID NO: 5 - DNA, 2244 bp, Homo sapiens
atgagtgccgaggaggatgccaggtggctccggtgggtgactcagcagtttaagaccattgcaggagaagatggggagatcagcctgcaagaattcaaagcagctctgcatgtgaaagagtccttctttgcagagcgattctttgccctatttgactccgatagaagtggcaccatcaccctccaggagctgcaggaggcactgaccctgctcatccatggcagccccatggacaaactcaaattcctcttccaggtgtatgacatcgatgtgtgtgcacggcagggggcgtctgcaggtacagagtggggtgctggggcaggcccgcactgggcttcatccccactcgggacaggcagtggctccattgacccggatgagctgcgcactgtgctgcagtcgtgtctgcgcgagagcgccatctcgctgcctgacgagaagctggaccagctgacgctggcgctcttcgaatcggccgacgcggacggcaacggggccatcaccttcgaggagctccgggacgagctgcagcgcttccccggagtcatggagaacctgaccatcagcgctgcccactggctgacggcccccgccccccgcccacgcccgcgccggccgcgccagctgacccgcgcctactggcacaaccaccgcagccagctgttctgcctggccacctatgcaggcctccacgtgctgctcttcgggctggcggccagcgcgcaccgggacctcggcgccagcgtcatggtggccaagggctgtggccagtgcctcaacttcgactgcagcttcatcgcggtgctgatgctcagacgctgcctcacctggctgcgggccacgtggctggctcaagtcctaccactggaccagaacatccagttccaccagcttatgggctacgtggtagtggggctgtccctcgtgcacactgtggctcacactgtgaactttgtactccaggctcaggcggaggccagccctttccagttctgggagctgctgctcaccacgaggcctggcattggctgggtacacggttcggcctccccgacaggtgtcgctctgctgctgctgctcctcctcatgttcatctgctccagttcctgcatccgcaggagtggccactttgaggtgttctattggactcacctgtcctacctcctcgtgtggcttctgctcatctttcatgggcccaacttctggaagtggctgctggtgcctggaatcttgtttttcctggagaaggccatcggactggcagtgtcccgcatggcagccgtgtgcatcatggaagtcaacctcctcccctccaaggtcactcatctcctcatcaagcggccccctttttttcactatagacctggtgactacttgtatctgaacatccccaccattgctcgctatgagtggcaccccttcaccatcagcagtgctcctgagcagaaagacactatctggctgcacattcggtcccaaggccagtggacaaacaggctgtatgagtccttcaaggcatcagacccactgggccgtggttctaagaggctgtcgaggagtgtgacaatgagaaagagtcaaaggtcgtccaagggctctgagatacttttggagaaacacaaattctgtaacatcaagtgctacatcgatgggccttatgggacccccacccgcaggatctttgcctctgagcatgccgtgctcatcggggcaggcatcggcatcaccccctttgcttccattctgcagagtatcatgtacaggcaccagaaaagaaagcatacttgccccagctgccagcactcctggatcgaaggtgtccaagacaacatgaagctccataaggtggactttatctggatcaacagagaccagcggtctttcgagtggtttgtgagcctgctgactaaactggagatggaccaggccgaggaggctcaatacggccgcttcctggagctgcatatgtacatgacatctgcactgggcaagaatgacatgaaggccattggcctgcagatggcccttgacctcctggccaacaaggagaagaaagactccatcacggggctgcagacgcgcacccagcctgggcggcctgactggagcaaggtgttccagaaagtggctgctgagaagaagggcaaggtgcaggtcttcttctgtggctccccagctctggccaaggtgctgaagggccattgtgagaagttcggcttcagatttttccaagagaatttctag

SEQ ID NO: 6 - DNA, 4647 bp, Homo sapiens
atgctccgtgcaagaccagaggcactgatgctcctgggagctcttctgactggatccctgggtccatcgggcaatcaggacgcactctcactgccctgggaagtgcagcgctatgacggctggtttaacaacctgaggcaccacgagcgtggtgctgttggctgccggttgcagcgccgcgtaccagccaattacgccgacggtgtgtatcaggctctggaggagccgcagctgcccaacccgcgccggctcagcaacgcagccacgcggggcatagccggcctgccgtcgctccacaaccgcaccgtactgggggtcttctttggctaccatgttctttccgacgtggtgagcgtggaaacgcccggttgccccgccgagttcctcaacatccgcatcccacctggagaccccgtgttcgaccccgaccagcgcggggacgtggtgctgcccttccagaggagccgctgggaccccgagaccggacggagtcccagcaacccccgggacctggccaaccaggtgacgggctggctggacggcagcgccatctatggctcctcgcactcctggagcgacgcgctgcggagcttctcggggggacagctggcgtcggggcccgaccccgctttcccccgagactcgcagaaccccctgctcatgtgggcggcgcccgaccccgccaccgggcagaacgggccccgggggctgtacgccttcggggcagagagagggaaccgggaacccttcctgcaggcgctgggcctgctctggttccgctaccacaacctgtgggcgcagaggctggcccgccagcacccagactgggaggacgaggagctgttccagcacgcacgcaagagggtcatcgccacctaccagaacatcgctgtgtatgagtggctgcccagcttcctgcagaaaacactcccggagtatacaggataccgtcctttcctagaccccagcatctccccggaatttgtggtggcctctgagcagttcttctctaccatggtgccccctggtgtctacatgagaaatgccagctgtcatttccggaaggtcctgaacaagggttttcaaagctcccaagctctcagggtctgcaacaactactggattcgggagaaccccaatctgaacagtacccaggaggtgaatgagctgctgctgggaatggcctcccagatttcggagttggaggacaacatagtggttgaagatctgagggattactggcctggccctggcaaattctcccgtacagactatgtggccagcagcatccaacgtggccgagatatggggctgcccagctatagccaggccctgctggcctttgggctggacatcccaaggaactggagtgatctcaaccctaatgtggacccccaggtgctggaggccacagctgccctgtacaaccaggacctatcccagctagagctgctccttggggggctcctggagagccatggggaccctggacccctgttcagtgccattgtcctcgaccagtttgtacggctgcgggatggtgaccgctactggtttgagaacaccaggaatgggctgttctccaagaaggagattgaagacatccgaaataccaccctgcgggacgtgctggtcgctgttatcaacattgaccccagtgccctgcagcccaatgtctttgtctggcataaaggtgcaccctgccctcaacctaagcagctcacaactgacggcctgccccagtgtgcacccctgactgtgcttgacttctttgaaggcagcagccctggttttgccatcaccatcattgctctctgctgccttcccttagtgagtctgcttctctctggagtggtggcctatttccggggccgagaacacaagaagctacaaaagaaactcaaagagagcgtgaagaaggaagcagccaaagatggagtgccagcgatggagtggccaggccccaaggagaggagcagtcccatcatcatccagctgctgtcagacaggtgtctgcaggtcctgaacaggcatctcactgtgctccgtgtggtccagctgcagcctctgcagcaggtcaacctcatcctgtccaacaaccgaggatgccgcaccctgctgctcaagatccctaaggagtatgacctggtgctgctgtttagttctgaagaggaacggggcgcctttgtgcagcagctatgggacttctgcgtgcgctgggctctgggcctccatgtggctgagatgagcgagaaggagctatttaggaaggctgtgacaaagcagcagcgggaacgcatcctggagatcttcttcagacacctttttgctcaggtgctggacatcaaccaggccgacgcagggaccctgcccctggactcctcccagaaggtgcgggaggccctgacctgcgagctgagcagggccgagtttgccgagtccctgggcctcaagccccaggacatgtttgtggagtccatgttctctctggctgacaaggatggcaatggctacctgtccttccgagagttcctggacatcctggtggtcttcatgaaaggctccccagaggataagtcccgtctaatgtttaccatgtatgacctggatgagaatggcttcctctccaaggacgaattcttcaccatgatgcgatccttcatcgagatctccaacaactgcctgtccaaggcccagctggccgaggtggtggagtctatgttccgggagtcgggattccaggacaaggaggagctgacatgggaggattttcacttcatgctgcgggaccatgacagcgagctccgcttcacgcagctctgtgtcaaaggtggaggtggaggtggaaatggtattagagatatctttaaacaaaacatcagctgtcgagtctcgttcatcactcggacacctggggagcgctcccacccccagggactggggccccctgccccagaagccccagagctgggaggccctggactgaagaagaggtttggcaaaaaggcagcagtgcccactccccggctgtacacagaggcgctgcaagagaagatgcagcgaggcttcctagcccaaaagctgcagcagtacaagcgcttcgtggagaactaccggaggcacatcgtgtgtgtggcaatcttctcggccatctgtgttggcgtgtttgcagatcgtgcttactactatggctttgcctcgccaccctcggacattgcacagaccaccctcgtgggcatcatcctgtcacgaggcacggcggccagcgtctccttcatgttctcttatatcttgctcaccatgtgccgcaacctcataaccttcctgcgagagactttcctcaaccgctatgtgccttttgatgccgcagtggacttccaccgctggatcgccatggctgctgttgtcctggccattttgcacagtgctggccacgcagtcaatgtctacatcttctcagtcagcccactcagcctgctggcctgcatattccccaacgtctttgtgaatgatgggtccaagcttccccagaagttctattggtggttcttccagaccgtcccaggtatgacaggtgtgcttctgctcctggtcctggccatcatgtatgtcttcgcctcccaccacttccgccgccgcagcttccggggcttctggctgacccaccacctctacatcctgctctatgccctgctcatcatccatggcagctatgctctgatccagctgcccactttccacatctacttcctggtcccggcaatcatctatggaggtgacaagctggtgagcctgagccggaagaaggtggagatcagcgtggtgaaggcggagctgctgccctcaggagtgacctacctgcaattccagaggccccaaggctttgagtacaagtcaggacagtgggtgcggatcgcctgcctggctctggggaccaccgagtaccaccccttcacactgacctccgcgccccatgaggacacactcagcctgcacatccgggcagtggggccctggaccactcgcctcagggagatctactcatccccaaagggcaatggctgtgctggatacccaaagctgtaccttgatggaccgtttggagagggccatcaggagtggcataaatttgaggtgtcagtgttggtgggagggggcattggggtcaccccctttgcctccatcctcaaagacctggtcttcaagtcatccttgggcagccaaatgctgtgtaagaagatctacttcatctgggtgacacggacccagcgtcagtttgagtggctggctgacatcatccaagaggtggaggagaacgaccaccaggacctggtgtctgtgcacatttatgtcacccagctggctgagaagttcgacctcaggaccaccatgctatacatctgcgagcggcacttccagaaagtgctgaaccggagtctgttcacgggcctgcgctccatcacccactttggccgtccccccttcgagcccttcttcaactccctgcaggaggtccacccacaggtgcgcaagatcggggtgttcagctgcggccctccaggaatgaccaagaatgtagagaaggcctgtcagctcgtcaacaggcaggaccgagcccacttcatgcaccactatgagaacttctga

SEQ ID NO: 7 - DNA, 1113 bp, Homo sapiens
atggcaggcccccgatacccagtttcagtgcaaggggcagccctggtgcagatcaagaggctccaaacgtttgccttctctgtgcgctggtcagacggcagcgacaccttcgtgcgcaggagttgggacgaattcaggcagctcaagaccctcaaggagaccttcccggtggaggcgggcctgctgcggagatctgaccgcgttctcccaaagcttctcgatgcaccactgttgggacgcgtggggcgcacgagccgcggcctggcgcgcctgcagctgttggaaacctattctcggaggctgctggcgactgcagagcgcgtggcacggagcccgacgatcactggcttcttcgcaccgcaacccctggacctggagcccgcgctgccacccggcagccgggtgatcctgcccaccccagaggagcagcctctttctcgcgctgcgggccgcctctccatccacagtctggaggctcagagcctgcgctgcctgcagcccttctgtacccaggacacgcgggataggccttttcaggcgcaggcccaggagagcctggacgtgctgctgcggcacccctcaggctggtggctggtggagaacgaagaccggcagaccgcctggtttccagcgccctacctggaggaggcggccccgggccaaggccgggagggaggcccgtccctagggagcagcggtccccagttctgtgcttcccgcgcctacgagagcagccgcgcagatgagctgtccgtgcccgcgggggcgcgcgtgcgcgtgttggaaacgtcagaccgcggctggtggctatgcaggtacggcgaccgggcgggcctactccccgcggtgctgctgcggccggaagggctgggcgctctcctgagcgggacggggttccgtggaggagacgacccggcgggtgaggcccggggcttccctgaaccctcccaggccaccgcccctccccccaccgtgcccacccgaccttcgccgggcgccatccagagccgctgctgcaccgtcacacgcagggccctggagcggcgcccacggcgccagggccgccctcgagggtgcgtggactctgtgccgcaccccacgacggagcagtga

SEQ ID NO: 8 - DNA, 1116 bp, Homo sapiens
atggcaggcccccgatacccagtttcagtgcaaggggcagccctggtgcagatcaagaggctccaaacgtttgccttctctgtgcgctggtcagacggcagcgacaccttcgtgcgcaggagttgggacgaattcaggcagctcaagaagaccctcaaggagaccttcccggtggaggcgggcctgctgcggagatctgaccgcgttctcccaaagcttctcgatgcaccactgttgggacgcgtggggcgcacgagccgcggcctggcgcgcctgcagctgttggaaacctattctcggaggctgctggcgactgcagagcgcgtggcacggagcccgacgatcactggcttcttcgcaccgcaacccctggacctggagcccgcgctgccacccggcagccgggtgatcctgcccaccccagaggagcagcctctttctcgcgctgcgggccgcctctccatccacagtctggaggctcagagcctgcgctgcctgcagcccttctgtacccaggacacgcgggataggccttttcaggcgcaggcccaggagagcctggacgtgctgctgcggcacccctcaggctggtggctggtggagaacgaagaccggcagaccgcctggtttccagcgccctacctggaggaggcggccccgggccaaggccgggagggaggcccgtccctagggagcagcggtccccagttctgtgcttcccgcgcctacgagagcagccgcgcagatgagctgtccgtgcccgcgggggcgcgcgtgcgcgtgttggaaacgtcagaccgcggctggtggctatgcaggtacggcgaccgggcgggcctactccccgcggtgctgctgcggccggaagggctgggcgctctcctgagcgggacggggttccgtggaggagacgacccggcgggtgaggcccggggcttccctgaaccctcccaggccaccgcccctccccccaccgtgcccacccgaccttcgccgggcgccatccagagccgctgctgcaccgtcacacgcagggccctggagcggcgcccacggcgccagggccgccctcgagggtgcgtggactctgtgccgcaccccacgacggagcagtga

SEQ ID NO: 9 - DNA, 1131 bp, Homo sapiens
atggcaggcccccgatacccagtttcagtgcaaggggcagccctggtgcagatcaagaggctccaaacgtttgccttctctgtgcgctggtcagacggcagcgacaccttcgtgcgcaggagttgggacgaattcaggcagctcaagaagaccctcaaggagaccttcccggtggaggcgggcctgctgcggagatctgaccgcgttctcccaaagcttctcggtcaggccagcctggatgcaccactgttgggacgcgtggggcgcacgagccgcggcctggcgcgcctgcagctgttggaaacctattctcggaggctgctggcgactgcagagcgcgtggcacggagcccgacgatcactggcttcttcgcaccgcaacccctggacctggagcccgcgctgccacccggcagccgggtgatcctgcccaccccagaggagcagcctctttctcgcgctgcgggccgcctctccatccacagtctggaggctcagagcctgcgctgcctgcagcccttctgtacccaggacacgcgggataggccttttcaggcgcaggcccaggagagcctggacgtgctgctgcggcacccctcaggctggtggctggtggagaacgaagaccggcagaccgcctggtttccagcgccctacctggaggaggcggccccgggccaaggccgggagggaggcccgtccctagggagcagcggtccccagttctgtgcttcccgcgcctacgagagcagccgcgcagatgagctgtccgtgcccgcgggggcgcgcgtgcgcgtgttggaaacgtcagaccgcggctggtggctatgcaggtacggcgaccgggcgggcctactccccgcggtgctgctgcggccggaagggctgggcgctctcctgagcgggacggggttccgtggaggagacgacccggcgggtgaggcccggggcttccctgaaccctcccaggccaccgcccctccccccaccgtgcccacccgaccttcgccgggcgccatccagagccgctgctgcaccgtcacacgcagggccctggagcggcgcccacggcgccagggccgccctcgagggtgcgtggactctgtgccgcaccccacgacggagcagtga

SEQ ID NO: 10 - DNA, 1173 bp, Homo sapiens
atgggggacaccttcatccgtcacatcgccctgctgggctttgagaagcgcttcgtacccagccagcactatgtgtacatgttcctggtgaaatggcaggacctgtcggagaaggtggtctaccggcgcttcaccgagatctacgagttccataaaaccttaaaagaaatgttccctattgaggcaggggcgatcaatccagagaacaggatcatcccccacctcccagctcccaagtggtttgacgggcagcgggccgccgagaaccgccagggcacacttaccgagtactgcggcacgctcatgagcctgcccaccaagatctcccgctgtccccacctcctcgacttcttcaaggtgcgccctgatgacctcaagctccccacggacaaccagacaaaaaagccagagacatacttgatgcccaaagatggcaagagtaccgcgacagacatcaccggccccatcatcctgcagacgtaccgcgccattgccaactacgagaagacctcgggctccgagatggctctgtccacgggggacgtggtggaggtcgtagagaagagcgagagcggttggtggttctgtcagatgaaagcaaagcgaggctggatcccagcgtccttcctcgagcccctggacagtcctgacgagacggaagaccctgagcccaactatgcaggtgagccatacgtcgccatcaaggcctacactgctgtggagggggacgaggtgtccctgctcgagggtgaagctgttgaggtcattcacaagctcctggacggctggtgggtcatcaggaaagacgacgtcacaggctacttcccgtccatgtacctgcaaaagtcagggcaagacgtgtcccaggcccaacgccagatcaagcggggggcgccgccccgcaggtcgtccatccgcaacgcgcacagcatccaccagcggtcgcggaagcgcctcagccaggacgcctatcgccgcaacagcgtccgttttctgcagcagcgacgccgccaggcgcggccgggaccgcagagccccgggagcccgctcgaggaggagcggcagacgcagcgctctaaaccgcagccggcggtgcccccgcggccgagcgccgacctcatcctgaaccgctgcagcgagagcaccaagcggaagctggcgtctgccgtctga

SEQ ID NO: 11 - DNA, 1452 bp, Homo sapiens
atggcctctctgggggacctggtgcgcgcctggcacctgggcgcgcaggctgtggatcgtggggactgggcccgcgccttgcacctcttctcgggcgtcccggcgccgcccgccaggctgtgcttcaacgcgggctgcgtgcacctgctggccggggaccccgaggccgcgctgcgggcatttgaccaagccgtgaccaaggacacctgcatggcggttggcttcttccagcgaggagtggccaacttccagctggcaaggttccaggaggctctgtctgacttctggctggccctggagcagctgaggggccacgctgccatcgactacacgcagctgggcctgcggttcaagctgcaagcctgggaggtgctacacaatgtggcgtcggcacagtgccagctggggctctggacagaggcggccagcagcctaagggaggccatgtccaagtggccggaggggtccctgaatggcctggactcagccctggaccaagtgcagagacggggctcactgccgccacggcaggtccccaggggcgaggtcttccggccccaccggtggcacctgaagcacttggagcccgtggatttcctgggcaaggccaaggtggtggcctctgccatccccgacgaccagggctggggcgtccgccctcagcagccacagggaccaggagcgaaccatgatgccaggtccctaatcatggactccccaagagctggcacccaccagggccccctcgatgcagagacagaggtcggtgctgaccgctgcacgtcgactgcctaccaggagcagaggccccaggtggagcaagttggcaaacaggctcctctctccccagggctgccggcaatgggggggcctggccccggcccctgtgaggaccccgcgggtgctgggggagcaggtgcagggggctccgagcccctggtgactgtcaccgtgcagtgcgccttcacagtggccctgagggcacgaagaggagccgacctgtccagcctgcgggcactgctgggccaagccctccctcaccaggcccagcttgggcaactcagttacctagccccaggtgaggacgggcactgggtccccatccccgaggaggagtcgctgcagagggcctggcaggacgcagctgcctgccccagggggctgcagctgcagtgcaggggagccgggggtcggccggtcctctaccaggtggtggcccagcacagctactccgcccaggggccagaggacctgggcttccgacagggggacacggtggacgtcctgtgtgaagagcccgatgtcccccttgcagtggaccaggcatggctggagggccactgtgacggccgcatcggcatcttccccaagtgcttcgtggtccccgccggccctcggatgtcaggagcccccggccgcctgccccgatcccagcagggagatcagccctaa

SEQ ID NO: 12 - DNA, 1581 bp, Homo sapiens
atgtccctggtggaggccatcagcctctggaatgaaggggtgctggcagcggacaagaaggactggaagggagccctggatgccttcagtgccgtccaggacccccactcccggatttgcttcaacattggctgcatgtacactatcctgaagaacatgactgaagcagagaaggcctttaccagaagcattaaccgagacaagcacttggcagtggcttacttccaacgagggatgctctactaccagacagagaaatatgatttggctatcaaagaccttaaagaagccttgattcagcttcgagggaaccagctgatagactataagatcctggggctccagttcaagctgtttgcctgtgaggtgttatataacattgctttcatgtatgccaagaaggaggaatggaaaaaagctgaagaacagttagcattggccacgagcatgaagtctgagcccagacattccaaaatcgacaaggcgatggagtgtgtctggaagcagaagctatatgagccagtggtgatccctgtgggcaagctgtttcgaccaaatgagagacaagtggctcagctggccaagaaggattacctaggcaaggcgacggtcgtggcatctgtggtggatcaagacagtttctctgggtttgcccctctgcaaccacaggcagctgagcctccacccagaccgaaaaccccagagatcttcagggctctggaaggggaggctcaccgtgtgctatttgggtttgtgcctgagacaaaagaagagctccaggtcatgccagggaacattgtctttgtcttgaagaagggcaatgataactgggccacggtcatgttcaacgggcagaaggggcttgttccctgcaactaccttgaaccagttgagctgcggatccaccctcagcagcagccccaggaggaaagctctccgcagtccgacatcccagctcctcctagttccaaagcccctggaagaccccagctgtcaccaggccagaaacaaaaagaagagcctaaggaagtgaagctcagtgttcccatgccctacacactcaaggtgcactacaagtacacggtagtcatgaagactcagcccgggctcccctacagccaggtccgggacatggtgtctaagaaactggagctccggctggaacacactaagctgagctatcggcctcgggacagcaatgagctggtgcccctttcagaagacagcatgaaggatgcctggggccaggtgaaaaactactgcctgactctgtggtgtgagaacacagtgggtgaccaaggctttccagatgaacccaaggaaagtgaaaaagctgatgctaataaccagacaacagaacctcagcttaagaaaggcagccaagtggaggcactcttcagttatgaggctacccaaccagaggacctggagtttcaggaaggggatataatcctggtgttatcaaaggtgaatgaagaatggctggaaggggagtgcaaagggaaggtgggcattttccccaaagtttttgttgaagactgcgcaactacagatttggaaagcactcggagagaagtctag

SEQ ID NO: 13 - RNA, 19 nt, artificial
  Oligomer
gcccuucauucaaucuaga

SEQ ID NO: 14 - RNA, 19 nt, artificial
  Oligomer
cauccauuuacccucacaa

SEQ ID NO: 15 - RNA, 19 nt, artificial
  Oligomer
ucauccauuuacccucaca

SEQ ID NO: 16 - RNA, 19 nt, artificial
  Oligomer
gccuuauccuuuuacccau

SEQ ID NO: 17 - RNA, 19 nt, artificial
  Oligomer
caauacucaacacccuguu

SEQ ID NO: 18 - RNA, 19 nt, artificial
  Oligomer
cccuucauucaaucuagaa

SEQ ID NO: 19 - RNA, 19 nt, artificial
  Oligomer
ggacucuaaagaaggaaug

SEQ ID NO: 20 - RNA, 19 nt, artificial
  Oligomer
ggaaacuuuuguuugauga

SEQ ID NO: 21 - RNA, 19 nt, artificial
  Oligomer
ccguugguuugcagauuua

SEQ ID NO: 22 - RNA, 19 nt, artificial
  Oligomer
cugcccuucauucaaucua

SEQ ID NO: 23 - RNA, 19 nt, artificial
  Oligomer
gaguauuucucagaacauu

SEQ ID NO: 24 - RNA, 19 nt, artificial
  Oligomer
ccaugaauguccugcuuuu

SEQ ID NO: 25 - RNA, 19 nt, artificial
  Oligomer
cugccuccaucuagucaag

SEQ ID NO: 26 - RNA, 19 nt, artificial
  Oligomer
ggguucaucuuaaaauagu

SEQ ID NO: 27 - RNA, 19 nt, artificial
  Oligomer
ccaacugaaaccaaagcaa

SEQ ID NO: 28 - RNA, 19 nt, artificial
  Oligomer
cgaaagacuuuacagguau

SEQ ID NO: 29 - RNA, 19 nt, artificial
  Oligomer
ccgaaagacuuuacaggua

SEQ ID NO: 30 - RNA, 19 nt, artificial
  Oligomer
ggauuuucaaaaccggcag

SEQ ID NO: 31 - RNA, 19 nt, artificial
  Oligomer
ggagauuguuggauaaaag

SEQ ID NO: 32 - RNA, 19 nt, artificial
  Oligomer
gcacacuguugauuuucau

SEQ ID NO: 33 - RNA, 19 nt, artificial
  Oligomer
ggagaaaaauaucaugcac

SEQ ID NO: 34 - RNA, 19 nt, artificial
  Oligomer
ugcccuucauucaaucuag

SEQ ID NO: 35 - RNA, 19 nt, artificial
  Oligomer
ugcuauuccucaugaucac

SEQ ID NO: 36 - RNA, 19 nt, artificial
  Oligomer
guggaaacuuuuguuugau

SEQ ID NO: 37 - RNA, 19 nt, artificial
  Oligomer
ucaauacucaacacccugu

SEQ ID NO: 38 - RNA, 19 nt, artificial
  Oligomer
guauauugaugguccuuuu

SEQ ID NO: 39 - RNA, 19 nt, artificial
  Oligomer
acugccuccaucuagucaa

SEQ ID NO: 40 - RNA, 19 nt, artificial
  Oligomer
ggagacuggacagaacgau

SEQ ID NO: 41 - RNA, 19 nt, artificial
  Oligomer
cacaauguguccaacugaa

SEQ ID NO: 42 - RNA, 19 nt, artificial
  Oligomer
ccggcugcaucagucuuaa

SEQ ID NO: 43 - RNA, 19 nt, artificial
  Oligomer
cuauuccucaugaucacag

SEQ ID NO: 44 - RNA, 19 nt, artificial
  Oligomer
ucacaacuguuccuggccu

SEQ ID NO: 45 - RNA, 19 nt, artificial
  Oligomer
ugaggauccuagaaaacuu

SEQ ID NO: 46 - RNA, 19 nt, artificial
  Oligomer
caacuucucagugaauuac

SEQ ID NO: 47 - RNA, 19 nt, artificial
  Oligomer
aggagauuguuggauaaaa

SEQ ID NO: 48 - RNA, 19 nt, artificial
  Oligomer
ccuuauccuuuuacccaug

SEQ ID NO: 49 - RNA, 19 nt, artificial
  Oligomer
aggacucuaaagaaggaau

SEQ ID NO: 50 - RNA, 19 nt, artificial
  Oligomer
cccaauucacuauccaaga

SEQ ID NO: 51 - RNA, 19 nt, artificial
  Oligomer
gacccaauucacuauccaa

SEQ ID NO: 52 - RNA, 19 nt, artificial
  Oligomer
gcauaacaaguuuuggcaa

SEQ ID NO: 53 - RNA, 19 nt, artificial
  Oligomer
ggcuaggauugugucuaag

SEQ ID NO: 54 - RNA, 19 nt, artificial
  Oligomer
cagaacgauuucgagauuu

SEQ ID NO: 55 - RNA, 19 nt, artificial
  Oligomer
cgaauggucaaagaaaauu

SEQ ID NO: 56 - RNA, 19 nt, artificial
  Oligomer
cucaugaucacagccucua

SEQ ID NO: 57 - RNA, 19 nt, artificial
  Oligomer
ugguguuacuaucuguauu

SEQ ID NO: 58 - RNA, 19 nt, artificial
  Oligomer
gguugaacaaaugcaagau

SEQ ID NO: 59 - RNA, 19 nt, artificial
  Oligomer
cuagugaggagcugaacuu

SEQ ID NO: 60 - RNA, 19 nt, artificial
  Oligomer
ggaaucaaucagcuguguu

SEQ ID NO: 61 - RNA, 19 nt, artificial
  Oligomer
cggaaucaaucagcugugu

SEQ ID NO: 62 - RNA, 19 nt, artificial
  Oligomer
gcaauuucuaagacuuuga

SEQ ID NO: 63 - RNA, 19 nt, artificial
  Oligomer
acccaauucacuauccaag

SEQ ID NO: 64 - RNA, 19 nt, artificial
  Oligomer
aggaaaaacaguugguguu

SEQ ID NO: 65 - RNA, 19 nt, artificial
  Oligomer
uggaaacuuuuguuugaug

SEQ ID NO: 66 - RNA, 19 nt, artificial
  Oligomer
cugaauucaagacuguuua

SEQ ID NO: 67 - RNA, 19 nt, artificial
  Oligomer
cagaagauaauuggagaaa

SEQ ID NO: 68 - RNA, 19 nt, artificial
  Oligomer
guaacuccauuugcaucaa

SEQ ID NO: 69 - RNA, 19 nt, artificial
  Oligomer
agaaaaucauccauuuacc

SEQ ID NO: 70 - RNA, 19 nt, artificial
  Oligomer
gaaagacuuuacagguaua

SEQ ID NO: 71 - RNA, 19 nt, artificial
  Oligomer
gaaaacuucucuucacaac

SEQ ID NO: 72 - RNA, 19 nt, artificial
  Oligomer
ggauccuagaaaacuucuc

SEQ ID NO: 73 - RNA, 19 nt, artificial
  Oligomer
agacuuuguugaacugaau

SEQ ID NO: 74 - RNA, 19 nt, artificial
  Oligomer
guugaacaaaugcaagauu

SEQ ID NO: 75 - RNA, 19 nt, artificial
  Oligomer
cuuauccuuuuacccaugu

SEQ ID NO: 76 - RNA, 19 nt, artificial
  Oligomer
cugcagccuuauccuuuua

SEQ ID NO: 77 - RNA, 19 nt, artificial
  Oligomer
ugccaaagaauaguaaggu

SEQ ID NO: 78 - RNA, 19 nt, artificial
  Oligomer
agaaggaaugagugcaauu

SEQ ID NO: 79 - RNA, 19 nt, artificial
  Oligomer
aaagaaggaaugagugcaa

SEQ ID NO: 80 - RNA, 19 nt, artificial
  Oligomer
cucuaaagaaggaaugagu

SEQ ID NO: 81 - RNA, 19 nt, artificial
  Oligomer
caggacucuaaagaaggaa

SEQ ID NO: 82 - RNA, 19 nt, artificial
  Oligomer
ccaagacucuucauaaacu

SEQ ID NO: 83 - RNA, 19 nt, artificial
  Oligomer
cuguucuuaaccucaacug

SEQ ID NO: 84 - RNA, 19 nt, artificial
  Oligomer
caauucacuauccaagacu

SEQ ID NO: 85 - RNA, 19 nt, artificial
  Oligomer
caucuguucuuaaccucaa

SEQ ID NO: 86 - RNA, 19 nt, artificial
  Oligomer
gcaaaauauaacagaggaa

SEQ ID NO: 87 - RNA, 19 nt, artificial
  Oligomer
gguggaaacuuuuguuuga

SEQ ID NO: 88 - RNA, 19 nt, artificial
  Oligomer
ucgguggaaacuuuuguuu

SEQ ID NO: 89 - RNA, 19 nt, artificial
  Oligomer
agaaaaauaucaugcacug

SEQ ID NO: 90 - RNA, 19 nt, artificial
  Oligomer
acagaagauaauuggagaa

SEQ ID NO: 91 - RNA, 19 nt, artificial
  Oligomer
cuaggauugugucuaagca

SEQ ID NO: 92 - RNA, 19 nt, artificial
  Oligomer
cccaagcuguauauugaug

SEQ ID NO: 93 - RNA, 19 nt, artificial
  Oligomer
acgauuucgagauuuacua

SEQ ID NO: 94 - RNA, 19 nt, artificial
  Oligomer
gacagaacgauuucgagau

SEQ ID NO: 95 - RNA, 19 nt, artificial
  Oligomer
acaauguguccaacugaaa

SEQ ID NO: 96 - RNA, 19 nt, artificial
  Oligomer
acccucacaauguguccaa

SEQ ID NO: 97 - RNA, 19 nt, artificial
  Oligomer
ccuguacugugccgaaaga

SEQ ID NO: 98 - RNA, 19 nt, artificial
  Oligomer
cagauuccaagcuaauuuu

SEQ ID NO: 99 - RNA, 19 nt, artificial
  Oligomer
caaacuaauuuagauaccc

SEQ ID NO: 100 - RNA, 19 nt, artificial
  Oligomer
agaugaggauccuagaaaa

SEQ ID NO: 101 - RNA, 19 nt, artificial
  Oligomer
cgagaugaggauccuagaa

SEQ ID NO: 102 - RNA, 19 nt, artificial
  Oligomer
ugaauuacagugaagacuu

SEQ ID NO: 103 - RNA, 19 nt, artificial
  Oligomer
ucguguuccucuuuaaauu

SEQ ID NO: 104 - RNA, 19 nt, artificial
  Oligomer
gagacccugaagaauauuu

SEQ ID NO: 105 - RNA, 19 nt, artificial
  Oligomer
acauguuuaaucuggaaac

SEQ ID NO: 106 - RNA, 19 nt, artificial
  Oligomer
gcagccuuauccuuuuacc

SEQ ID NO: 107 - RNA, 19 nt, artificial
  Oligomer
guuaugccaaagaauagua

SEQ ID NO: 108 - RNA, 19 nt, artificial
  Oligomer
ugagugcaauuucuaagac

SEQ ID NO: 109 - RNA, 19 nt, artificial
  Oligomer
acaauaaagagucuuucag

SEQ ID NO: 110 - RNA, 19 nt, artificial
  Oligomer
acaacucauaugggacaag

SEQ ID NO: 111 - RNA, 19 nt, artificial
  Oligomer
guggacccaauucacuauc

SEQ ID NO: 112 - RNA, 19 nt, artificial
  Oligomer
cucgguggaaacuuuuguu

SEQ ID NO: 113 - RNA, 19 nt, artificial
  Oligomer
gagaaaaauaucaugcacu

SEQ ID NO: 114 - RNA, 19 nt, artificial
  Oligomer
uggagaaaaauaucaugca

SEQ ID NO: 115 - RNA, 19 nt, artificial
  Oligomer
acaaguuuuggcaagagaa

SEQ ID NO: 116 - RNA, 19 nt, artificial
  Oligomer
ugaggaaucacugaacuau

SEQ ID NO: 117 - RNA, 19 nt, artificial
  Oligomer
gcuguauauugaugguccu

SEQ ID NO: 118 - RNA, 19 nt, artificial
  Oligomer
caagcuguauauugauggu

SEQ ID NO: 119 - RNA, 19 nt, artificial
  Oligomer
uggucaguauauuacucua

SEQ ID NO: 120 - RNA, 19 nt, artificial
  Oligomer
ccgaauggucaaagaaaau

SEQ ID NO: 121 - RNA, 19 nt, artificial
  Oligomer
aguuuacccagcacaaauu

SEQ ID NO: 122 - RNA, 19 nt, artificial
  Oligomer
gaguuuacccagcacaaau

SEQ ID NO: 123 - RNA, 19 nt, artificial
  Oligomer
uccucaugaucacagccuc

SEQ ID NO: 124 - RNA, 19 nt, artificial
  Oligomer
cuccaugaauguccugcuu

SEQ ID NO: 125 - RNA, 19 nt, artificial
  Oligomer
gugaauuacagugaagacu

SEQ ID NO: 126 - RNA, 19 nt, artificial
  Oligomer
cagugaauuacagugaaga

SEQ ID NO: 127 - RNA, 19 nt, artificial
  Oligomer
ccgaggaucacagaagguu

SEQ ID NO: 128 - RNA, 19 nt, artificial
  Oligomer
ccgaacacucuuggcuuac

SEQ ID NO: 129 - RNA, 19 nt, artificial
  Oligomer
cuuuuacccaugugccgaa

SEQ ID NO: 130 - RNA, 19 nt, artificial
  Oligomer
ugauuuucaugguggauuc

SEQ ID NO: 131 - RNA, 19 nt, artificial
  Oligomer
aggaaugagugcaauuucu

SEQ ID NO: 132 - RNA, 19 nt, artificial
  Oligomer
aagaaggaaugagugcaau

SEQ ID NO: 133 - RNA, 19 nt, artificial
  Oligomer
ugggacaagauuugaauac

SEQ ID NO: 134 - RNA, 19 nt, artificial
  Oligomer
gcaucuguucuuaaccuca

SEQ ID NO: 135 - RNA, 19 nt, artificial
  Oligomer
acugaauucaagacuguuu

SEQ ID NO: 136 - RNA, 19 nt, artificial
  Oligomer
gggauacagaagauaauug

SEQ ID NO: 137 - RNA, 19 nt, artificial
  Oligomer
cucuguauguugcauaaca

SEQ ID NO: 138 - RNA, 19 nt, artificial
  Oligomer
ugcagagauauccaguccu

SEQ ID NO: 139 - RNA, 19 nt, artificial
  Oligomer
gacuauacuuuauuugggu

SEQ ID NO: 140 - RNA, 19 nt, artificial
  Oligomer
ccuguuggaugacuggaaa

SEQ ID NO: 141 - RNA, 19 nt, artificial
  Oligomer
ggauugugucuaagcagag

SEQ ID NO: 142 - RNA, 19 nt, artificial
  Oligomer
aggauugugucuaagcaga

SEQ ID NO: 143 - RNA, 19 nt, artificial
  Oligomer
aacuccauuugcaucaaua

SEQ ID NO: 144 - RNA, 19 nt, artificial
  Oligomer
ccaagcuguauauugaugg

SEQ ID NO: 145 - RNA, 19 nt, artificial
  Oligomer
acuccgaaauucugcccuu

SEQ ID NO: 146 - RNA, 19 nt, artificial
  Oligomer
cuggacagaacgauuucga

SEQ ID NO: 147 - RNA, 19 nt, artificial
  Oligomer
gccgaaagacuuuacaggu

SEQ ID NO: 148 - RNA, 19 nt, artificial
  Oligomer
cggcugcaucagucuuaac

SEQ ID NO: 149 - RNA, 19 nt, artificial
  Oligomer
ucuacaugcugcugacguu

SEQ ID NO: 150 - RNA, 19 nt, artificial
  Oligomer
ucuucugguauacucauaa

SEQ ID NO: 151 - RNA, 19 nt, artificial
  Oligomer
gugguguuacuaucuguau

SEQ ID NO: 152 - RNA, 19 nt, artificial
  Oligomer
ccugugguguuacuaucug

SEQ ID NO: 153 - RNA, 19 nt, artificial
  Oligomer
caggagauuguuggauaaa

SEQ ID NO: 154 - RNA, 19 nt, artificial
  Oligomer
ugguugaacaaaugcaaga

SEQ ID NO: 155 - RNA, 19 nt, artificial
  Oligomer
cccugaagaauauuugaug

SEQ ID NO: 156 - RNA, 19 nt, artificial
  Oligomer
acccugaagaauauuugau

SEQ ID NO: 157 - RNA, 19 nt, artificial
  Oligomer
agagacccugaagaauauu

SEQ ID NO: 158 - RNA, 19 nt, artificial
  Oligomer
cuguguuaugccaaagaau

SEQ ID NO: 159 - RNA, 19 nt, artificial
  Oligomer
gagugcaauuucuaagacu

SEQ ID NO: 160 - RNA, 19 nt, artificial
  Oligomer
ugaaaacuuuugccaugaa

SEQ ID NO: 161 - RNA, 19 nt, artificial
  Oligomer
gaacaacucauaugggaca

SEQ ID NO: 162 - RNA, 19 nt, artificial
  Oligomer
agaggaaaaacaguuggug

SEQ ID NO: 163 - RNA, 19 nt, artificial
  Oligomer
cgguggaaacuuuuguuug

SEQ ID NO: 164 - RNA, 19 nt, artificial
  Oligomer
cagcaucuguucuuaaccu

SEQ ID NO: 165 - RNA, 19 nt, artificial
  Oligomer
uaacaaguuuuggcaagag

SEQ ID NO: 166 - RNA, 19 nt, artificial
  Oligomer
ugcauaacaaguuuuggca

SEQ ID NO: 167 - RNA, 19 nt, artificial
  Oligomer
uuacucuguauguugcaua

SEQ ID NO: 168 - RNA, 19 nt, artificial
  Oligomer
uguauauugaugguccuuu

SEQ ID NO: 169 - RNA, 19 nt, artificial
  Oligomer
cgauuucgagauuuacuac

SEQ ID NO: 170 - RNA, 19 nt, artificial
  Oligomer
ggacagaacgauuucgaga

SEQ ID NO: 171 - RNA, 19 nt, artificial
  Oligomer
cccucagaugucauggaaa

SEQ ID NO: 172 - RNA, 19 nt, artificial
  Oligomer
ccuucuugcuguauaacca

SEQ ID NO: 173 - RNA, 19 nt, artificial
  Oligomer
caugaaccuuucccugaag

SEQ ID NO: 174 - RNA, 19 nt, artificial
  Oligomer
ccagaguauuucucagaac

SEQ ID NO: 175 - RNA, 19 nt, artificial
  Oligomer
ccagcucucagaauauuuc

SEQ ID NO: 176 - RNA, 19 nt, artificial
  Oligomer
gacguugcauguuucagga

SEQ ID NO: 177 - RNA, 19 nt, artificial
  Oligomer
cuaugauaucuucugguau

SEQ ID NO: 178 - RNA, 19 nt, artificial
  Oligomer
ugaauguccugcuuuucug

SEQ ID NO: 179 - RNA, 19 nt, artificial
  Oligomer
cuaacuaugauaucuucug

SEQ ID NO: 180 - RNA, 19 nt, artificial
  Oligomer
gcaauaagaguuucuaacu

SEQ ID NO: 181 - RNA, 19 nt, artificial
  Oligomer
ugaucacagccucuacaua

SEQ ID NO: 182 - RNA, 19 nt, artificial
  Oligomer
gaggauccuagaaaacuuc

SEQ ID NO: 183 - RNA, 19 nt, artificial
  Oligomer
uuacagugaagacuuuguu

SEQ ID NO: 184 - RNA, 19 nt, artificial
  Oligomer
acauuccauauuaccugug

SEQ ID NO: 185 - RNA, 19 nt, artificial
  Oligomer
gaacauuccauauuaccug

SEQ ID NO: 186 - RNA, 19 nt, artificial
  Oligomer
guguuccucuuuaaauugu

SEQ ID NO: 187 - RNA, 19 nt, artificial
  Oligomer
gucguguuccucuuuaaau

SEQ ID NO: 188 - RNA, 19 nt, artificial
  Oligomer
ggcugauugucguguuccu

SEQ ID NO: 189 - RNA, 19 nt, artificial
  Oligomer
cacuguugauuuucauggu

SEQ ID NO: 190 - RNA, 19 nt, artificial
  Oligomer
ugcacacuguugauuuuca

SEQ ID NO: 191 - RNA, 19 nt, artificial
  Oligomer
agacccugaagaauauuug

SEQ ID NO: 192 - RNA, 19 nt, artificial
  Oligomer
gcaagaugaccgucacauu

SEQ ID NO: 193 - RNA, 19 nt, artificial
  Oligomer
ugcagccuuauccuuuuac

SEQ ID NO: 194 - RNA, 19 nt, artificial
  Oligomer
acugcagccuuauccuuuu

SEQ ID NO: 195 - RNA, 19 nt, artificial
  Oligomer
gugcaauuucuaagacuuu

SEQ ID NO: 196 - RNA, 19 nt, artificial
  Oligomer
agugcaauuucuaagacuu

SEQ ID NO: 197 - RNA, 19 nt, artificial
  Oligomer
ugaagcaggacucuaaaga

SEQ ID NO: 198 - RNA, 19 nt, artificial
  Oligomer
aaagagucuuucagcugaa

SEQ ID NO: 199 - RNA, 19 nt, artificial
  Oligomer
ucauaugggacaagauuug

SEQ ID NO: 200 - RNA, 19 nt, artificial
  Oligomer
aacaacucauaugggacaa

SEQ ID NO: 201 - RNA, 19 nt, artificial
  Oligomer
cuauccaagacucuucaua

SEQ ID NO: 202 - RNA, 19 nt, artificial
  Oligomer
ucacuauccaagacucuuc

SEQ ID NO: 203 - RNA, 19 nt, artificial
  Oligomer
cagaggaaaaacaguuggu

SEQ ID NO: 204 - RNA, 19 nt, artificial
  Oligomer
agcaucuguucuuaaccuc

SEQ ID NO: 205 - RNA, 19 nt, artificial
  Oligomer
ccucgguggaaacuuuugu

SEQ ID NO: 206 - RNA, 19 nt, artificial
  Oligomer
agaugggauacagaagaua

SEQ ID NO: 207 - RNA, 19 nt, artificial
  Oligomer
uacucuguauguugcauaa

SEQ ID NO: 208 - RNA, 19 nt, artificial
  Oligomer
agacuauacuuuauuuggg

SEQ ID NO: 209 - RNA, 19 nt, artificial
  Oligomer
gcuggaggcauuggaguaa

SEQ ID NO: 210 - RNA, 19 nt, artificial
  Oligomer
ucccaagcuguauauugau

SEQ ID NO: 211 - RNA, 19 nt, artificial
  Oligomer
uccaacugaaaccaaagca

SEQ ID NO: 212 - RNA, 19 nt, artificial
  Oligomer
cuggucaguauauuacucu

SEQ ID NO: 213 - RNA, 19 nt, artificial
  Oligomer
ccaucauuucggucauaag

SEQ ID NO: 214 - RNA, 19 nt, artificial
  Oligomer
gguauauccggagcaauaa

SEQ ID NO: 215 - RNA, 19 nt, artificial
  Oligomer
ggauuucuggaccuuugug

SEQ ID NO: 216 - RNA, 19 nt, artificial
  Oligomer
aaaaccuucuugcuguaua

SEQ ID NO: 217 - RNA, 19 nt, artificial
  Oligomer
auacucauaaccucuucuu

SEQ ID NO: 218 - RNA, 19 nt, artificial
  Oligomer
guauacucauaaccucuuc

SEQ ID NO: 219 - RNA, 19 nt, artificial
  Oligomer
cuucugguauacucauaac

SEQ ID NO: 220 - RNA, 19 nt, artificial
  Oligomer
aucuucugguauacucaua

SEQ ID NO: 221 - RNA, 19 nt, artificial
  Oligomer
uccaugaauguccugcuuu

SEQ ID NO: 222 - RNA, 19 nt, artificial
  Oligomer
gugaagacuuuguugaacu

SEQ ID NO: 223 - RNA, 19 nt, artificial
  Oligomer
acagugaagacuuuguuga

SEQ ID NO: 224 - RNA, 19 nt, artificial
  Oligomer
acaaaugcaagauugaaca

SEQ ID NO: 225 - RNA, 19 nt, artificial
  Oligomer
uugauuuucaugguggauu

SEQ ID NO: 226 - RNA, 19 nt, artificial
  Oligomer
agaugcacacuguugauuu

SEQ ID NO: 227 - RNA, 19 nt, artificial
  Oligomer
accucaacugcagccuuau

SEQ ID NO: 228 - RNA, 19 nt, artificial
  Oligomer
cucauaugggacaagauuu

SEQ ID NO: 229 - RNA, 19 nt, artificial
  Oligomer
cagaacaacucauauggga

SEQ ID NO: 230 - RNA, 19 nt, artificial
  Oligomer
ccagaacaacucauauggg

SEQ ID NO: 231 - RNA, 19 nt, artificial
  Oligomer
caagacucuucauaaacug

SEQ ID NO: 232 - RNA, 19 nt, artificial
  Oligomer
gguguuuucuguuguggac

SEQ ID NO: 233 - RNA, 19 nt, artificial
  Oligomer
caguugguguuuucuguug

SEQ ID NO: 234 - RNA, 19 nt, artificial
  Oligomer
ucaagacuguuuauaggac

SEQ ID NO: 235 - RNA, 19 nt, artificial
  Oligomer
cacugaauucaagacuguu

SEQ ID NO: 236 - RNA, 19 nt, artificial
  Oligomer
ggauacagaagauaauugg

SEQ ID NO: 237 - RNA, 19 nt, artificial
  Oligomer
augggauacagaagauaau

SEQ ID NO: 238 - RNA, 19 nt, artificial
  Oligomer
agauuuacucuguauguug

SEQ ID NO: 239 - RNA, 19 nt, artificial
  Oligomer
cuguauauugaugguccuu

SEQ ID NO: 240 - RNA, 19 nt, artificial
  Oligomer
ucgagauuuacuacugccu

SEQ ID NO: 241 - RNA, 19 nt, artificial
  Oligomer
guaucugcauuagaaaauc

SEQ ID NO: 242 - RNA, 19 nt, artificial
  Oligomer
ccuggucaguauauuacuc

SEQ ID NO: 243 - RNA, 19 nt, artificial
  Oligomer
gacuuggcuuuggauuucu

SEQ ID NO: 244 - RNA, 19 nt, artificial
  Oligomer
ugauaucuucugguauacu

SEQ ID NO: 245 - RNA, 19 nt, artificial
  Oligomer
aagacuuuguugaacugaa

SEQ ID NO: 246 - RNA, 19 nt, artificial
  Oligomer
ugaagacuuuguugaacug

SEQ ID NO: 247 - RNA, 19 nt, artificial
  Oligomer
cagugaagacuuuguugaa

SEQ ID NO: 248 - RNA, 19 nt, artificial
  Oligomer
ugugguguuacuaucugua

SEQ ID NO: 249 - RNA, 19 nt, artificial
  Oligomer
cugugguguuacuaucugu

SEQ ID NO: 250 - RNA, 19 nt, artificial
  Oligomer
ugaacaaaugcaagauuga

SEQ ID NO: 251 - RNA, 19 nt, artificial
  Oligomer
uugucguguuccucuuuaa

SEQ ID NO: 252 - RNA, 19 nt, artificial
  Oligomer
ugauugucguguuccucuu

SEQ ID NO: 253 - RNA, 19 nt, artificial
  Oligomer
acuguugauuuucauggug

SEQ ID NO: 254 - RNA, 19 nt, artificial
  Oligomer
ccugaagaauauuugaugu

SEQ ID NO: 255 - RNA, 19 nt, artificial
  Oligomer
ggaaaugugagaauguggc

SEQ ID NO: 256 - RNA, 19 nt, artificial
  Oligomer
caacugcagccuuauccuu

SEQ ID NO: 257 - RNA, 19 nt, artificial
  Oligomer
ugcaauuucuaagacuuug

SEQ ID NO: 258 - RNA, 19 nt, artificial
  Oligomer
gcugaaaacuuuugccaug

SEQ ID NO: 259 - RNA, 19 nt, artificial
  Oligomer
auaugggacaagauuugaa

SEQ ID NO: 260 - RNA, 19 nt, artificial
  Oligomer
auccaagacucuucauaaa

SEQ ID NO: 261 - RNA, 19 nt, artificial
  Oligomer
cacuauccaagacucuuca

SEQ ID NO: 262 - RNA, 19 nt, artificial
  Oligomer
uaacagaggaaaaacaguu

SEQ ID NO: 263 - RNA, 19 nt, artificial
  Oligomer
ugggauacagaagauaauu

SEQ ID NO: 264 - RNA, 19 nt, artificial
  Oligomer
cagucaaacagaugggaua

SEQ ID NO: 265 - RNA, 19 nt, artificial
  Oligomer
ggguaugcagagauaucca

SEQ ID NO: 266 - RNA, 19 nt, artificial
  Oligomer
uggaggcauuggaguaacu

SEQ ID NO: 267 - RNA, 19 nt, artificial
  Oligomer
ccauuugaggaaucacuga

SEQ ID NO: 268 - RNA, 19 nt, artificial
  Oligomer
gaccuggucaguauauuac

SEQ ID NO: 269 - RNA, 19 nt, artificial
  Oligomer
ggaaauccgaauggucaaa

SEQ ID NO: 270 - RNA, 19 nt, artificial
  Oligomer
ucaccaucauuucggucau

SEQ ID NO: 271 - RNA, 19 nt, artificial
  Oligomer
cagacuuggcuuuggauuu

SEQ ID NO: 272 - RNA, 19 nt, artificial
  Oligomer
acagacuuggcuuuggauu

SEQ ID NO: 273 - RNA, 19 nt, artificial
  Oligomer
gcuaauuuuccacagacuu

SEQ ID NO: 274 - RNA, 19 nt, artificial
  Oligomer
ugugaagauuuguauggaa

SEQ ID NO: 275 - RNA, 19 nt, artificial
  Oligomer
gaaaaccuucuugcuguau

SEQ ID NO: 276 - RNA, 19 nt, artificial
  Oligomer
cucauaaccucuucuuugu

SEQ ID NO: 277 - RNA, 19 nt, artificial
  Oligomer
ugcaauaagaguuucuaac

SEQ ID NO: 278 - RNA, 19 nt, artificial
  Oligomer
aaaagcagaacauuccaua

SEQ ID NO: 279 - RNA, 19 nt, artificial
  Oligomer
uaaaagcagaacauuccau

SEQ ID NO: 280 - RNA, 19 nt, artificial
  Oligomer
cguguuccucuuuaaauug

SEQ ID NO: 281 - RNA, 19 nt, artificial
  Oligomer
uaaggcugauugucguguu

SEQ ID NO: 282 - RNA, 19 nt, artificial
  Oligomer
ucaugguggauucaagaac

SEQ ID NO: 283 - RNA, 19 nt, artificial
  Oligomer
cugaagaauauuugaugug

SEQ ID NO: 284 - RNA, 19 nt, artificial
  Oligomer
cuuugaaacucagcggaau

SEQ ID NO: 285 - RNA, 19 nt, artificial
  Oligomer
aguaaccagaacaacucau

SEQ ID NO: 286 - RNA, 19 nt, artificial
  Oligomer
gguaugcagagauauccag

SEQ ID NO: 287 - RNA, 19 nt, artificial
  Oligomer
ggaggcauuggaguaacuc

SEQ ID NO: 288 - RNA, 19 nt, artificial
  Oligomer
cuggaggcauuggaguaac

SEQ ID NO: 289 - RNA, 19 nt, artificial
  Oligomer
cauuugaggaaucacugaa

SEQ ID NO: 290 - RNA, 19 nt, artificial
  Oligomer
guguaucugcauuagaaaa

SEQ ID NO: 291 - RNA, 19 nt, artificial
  Oligomer
agcaagaccuggucaguau

SEQ ID NO: 292 - RNA, 19 nt, artificial
  Oligomer
cacagacuuggcuuuggau

SEQ ID NO: 293 - RNA, 19 nt, artificial
  Oligomer
accagcucucagaauauuu

SEQ ID NO: 294 - RNA, 19 nt, artificial
  Oligomer
agaugaccgucacauuaca

SEQ ID NO: 295 - RNA, 19 nt, artificial
  Oligomer
caagaugaccgucacauua

SEQ ID NO: 296 - RNA, 19 nt, artificial
  Oligomer
gacuuugaaacucagcgga

SEQ ID NO: 297 - RNA, 19 nt, artificial
  Oligomer
cugaaaacuuuugccauga

SEQ ID NO: 298 - RNA, 19 nt, artificial
  Oligomer
guugguguuuucuguugug

SEQ ID NO: 299 - RNA, 19 nt, artificial
  Oligomer
acagaugggauacagaaga

SEQ ID NO: 300 - RNA, 19 nt, artificial
  Oligomer
gucaaacagaugggauaca

SEQ ID NO: 301 - RNA, 19 nt, artificial
  Oligomer
ggcuuccacucagucuuug

SEQ ID NO: 302 - RNA, 19 nt, artificial
  Oligomer
cuagucaagacuccgaaau

SEQ ID NO: 303 - RNA, 19 nt, artificial
  Oligomer
agcucucagaauauuuccu

SEQ ID NO: 304 - RNA, 19 nt, artificial
  Oligomer
aaccagcucucagaauauu

SEQ ID NO: 305 - RNA, 19 nt, artificial
  Oligomer
auaaccucuucuuugucuu

SEQ ID NO: 306 - RNA, 19 nt, artificial
  Oligomer
cacagaagguuccaagcag

SEQ ID NO: 307 - RNA, 19 nt, artificial
  Oligomer
gaaaacuuuugccaugaag

SEQ ID NO: 308 - RNA, 19 nt, artificial
  Oligomer
agcaaaauauaacagagga

SEQ ID NO: 309 - RNA, 19 nt, artificial
  Oligomer
ucaaacagaugggauacag

SEQ ID NO: 310 - RNA, 19 nt, artificial
  Oligomer
ucagucaaacagaugggau

SEQ ID NO: 311 - RNA, 19 nt, artificial
  Oligomer
cccucacaauguguccaac

SEQ ID NO: 312 - RNA, 19 nt, artificial
  Oligomer
ccauuuacccucacaaugu

SEQ ID NO: 313 - RNA, 19 nt, artificial
  Oligomer
agacuuuacagguauaucc

SEQ ID NO: 314 - RNA, 19 nt, artificial
  Oligomer
cagaguauuucucagaaca

SEQ ID NO: 315 - RNA, 19 nt, artificial
  Oligomer
agaaaacuguuagaugcac

SEQ ID NO: 316 - RNA, 19 nt, artificial
  Oligomer
gccuccaucuagucaagac

SEQ ID NO: 317 - RNA, 19 nt, artificial
  Oligomer
auaagccagucaccaucau

SEQ ID NO: 318 - RNA, 19 nt, artificial
  Oligomer
ggagcaauaagccagucac

SEQ ID NO: 319 - RNA, 19 nt, artificial
  Oligomer
accuuucccugaaggauuu

SEQ ID NO: 320 - RNA, 19 nt, artificial
  Oligomer
accucuucuuugucuucua

SEQ ID NO: 321 - RNA, 19 nt, artificial
  Oligomer
ccgaaauucugcccuucau

SEQ ID NO: 322 - RNA, 19 nt, artificial
  Oligomer
aagccagucaccaucauuu

SEQ ID NO: 323 - RNA, 19 nt, artificial
  Oligomer
cggagcaauaagccaguca

SEQ ID NO: 324 - RNA, 19 nt, artificial
  Oligomer
guauggaagagcccagauu

SEQ ID NO: 325 - RNA, 19 nt, artificial
  Oligomer
cccugaaggauuuucaaaa

SEQ ID NO: 326 - RNA, 19 nt, artificial
  Oligomer
cccucaacuucucagugaa

SEQ ID NO: 327 - RNA, 19 nt, artificial
  Oligomer
ccaugugccgaacacucuu

SEQ ID NO: 328 - RNA, 19 nt, artificial
  Oligomer
ggacccaauucacuaucca

SEQ ID NO: 329 - RNA, 19 nt, artificial
  Oligomer
gcauuggaguaacuccauu

SEQ ID NO: 330 - RNA, 19 nt, artificial
  Oligomer
ccuucauucaaucuagaaa

SEQ ID NO: 331 - RNA, 19 nt, artificial
  Oligomer
ggccagaguaucacuaccu

SEQ ID NO: 332 - RNA, 19 nt, artificial
  Oligomer
cucacaauguguccaacug

SEQ ID NO: 333 - RNA, 19 nt, artificial
  Oligomer
ccagucaccaucauuucgg

SEQ ID NO: 334 - RNA, 19 nt, artificial
  Oligomer
ccaagcuaauuuuccacag

SEQ ID NO: 335 - RNA, 19 nt, artificial
  Oligomer
accagaguauuucucagaa

SEQ ID NO: 336 - RNA, 19 nt, artificial
  Oligomer
gccucuacauaugcaauaa

SEQ ID NO: 337 - RNA, 19 nt, artificial
  Oligomer
ugguggugcuauuccucau

SEQ ID NO: 338 - RNA, 19 nt, artificial
  Oligomer
ggauaaaagcagaacauuc

SEQ ID NO: 339 - RNA, 19 nt, artificial
  Oligomer
uggauaaaagcagaacauu

SEQ ID NO: 340 - RNA, 19 nt, artificial
  Oligomer
uuggauaaaagcagaacau

SEQ ID NO: 341 - RNA, 19 nt, artificial
  Oligomer
gccucagcaucuguucuua

SEQ ID NO: 342 - RNA, 19 nt, artificial
  Oligomer
guauguugcauaacaaguu

SEQ ID NO: 343 - RNA, 19 nt, artificial
  Oligomer
uccuuuuggaaguccauuu

SEQ ID NO: 344 - RNA, 19 nt, artificial
  Oligomer
ccuccaucuagucaagacu

SEQ ID NO: 345 - RNA, 19 nt, artificial
  Oligomer
gccagaguaucacuaccuc

SEQ ID NO: 346 - RNA, 19 nt, artificial
  Oligomer
ccucacaauguguccaacu

SEQ ID NO: 347 - RNA, 19 nt, artificial
  Oligomer
gcauuagaaaaucauccau

SEQ ID NO: 348 - RNA, 19 nt, artificial
  Oligomer
gaaauccgaauggucaaag

SEQ ID NO: 349 - RNA, 19 nt, artificial
  Oligomer
cauaagucaucccucagau

SEQ ID NO: 350 - RNA, 19 nt, artificial
  Oligomer
ucauaagucaucccucaga

SEQ ID NO: 351 - RNA, 19 nt, artificial
  Oligomer
gucaccaucauuucgguca

SEQ ID NO: 352 - RNA, 19 nt, artificial
  Oligomer
caauaagccagucaccauc

SEQ ID NO: 353 - RNA, 19 nt, artificial
  Oligomer
agaguauuucucagaacau

SEQ ID NO: 354 - RNA, 19 nt, artificial
  Oligomer
gcaucagucuuaaccgaac

SEQ ID NO: 355 - RNA, 19 nt, artificial
  Oligomer
ugcugaaguaucaaacuaa

SEQ ID NO: 356 - RNA, 19 nt, artificial
  Oligomer
uggugcuauuccucaugau

SEQ ID NO: 357 - RNA, 19 nt, artificial
  Oligomer
gguggugcuauuccucaug

SEQ ID NO: 358 - RNA, 19 nt, artificial
  Oligomer
cuagaaaacuucucuucac

SEQ ID NO: 359 - RNA, 19 nt, artificial
  Oligomer
cucaacuucucagugaauu

SEQ ID NO: 360 - RNA, 19 nt, artificial
  Oligomer
ccauauuaccugugguguu

SEQ ID NO: 361 - RNA, 19 nt, artificial
  Oligomer
ccgucacauuacauguuua

SEQ ID NO: 362 - RNA, 19 nt, artificial
  Oligomer
gcaagaccuggucaguaua

SEQ ID NO: 363 - RNA, 19 nt, artificial
  Oligomer
agcuaauuuuccacagacu

SEQ ID NO: 364 - RNA, 19 nt, artificial
  Oligomer
caagcuaauuuuccacaga

SEQ ID NO: 365 - RNA, 19 nt, artificial
  Oligomer
gaagauuuguauggaagag

SEQ ID NO: 366 - RNA, 19 nt, artificial
  Oligomer
gggcugcugaaguaucaaa

SEQ ID NO: 367 - RNA, 19 nt, artificial
  Oligomer
ccucuucuuugucuucuac

SEQ ID NO: 368 - RNA, 19 nt, artificial
  Oligomer
ucaacuucucagugaauua

SEQ ID NO: 369 - RNA, 19 nt, artificial
  Oligomer
uuguuggauaaaagcagaa

SEQ ID NO: 370 - RNA, 19 nt, artificial
  Oligomer
accucugccuguucaucug

SEQ ID NO: 371 - RNA, 19 nt, artificial
  Oligomer
agcugaacuugcucaaucu

SEQ ID NO: 372 - RNA, 19 nt, artificial
  Oligomer
aggagcugaacuugcucaa

SEQ ID NO: 373 - RNA, 19 nt, artificial
  Oligomer
ggaaaccaaagagacccug

SEQ ID NO: 374 - RNA, 19 nt, artificial
  Oligomer
cuguuguggacccaauuca

SEQ ID NO: 375 - RNA, 19 nt, artificial
  Oligomer
gaccugacuaugucaacau

SEQ ID NO: 376 - RNA, 19 nt, artificial
  Oligomer
uccauuugcaucaauacuc

SEQ ID NO: 377 - RNA, 19 nt, artificial
  Oligomer
ccuuuuggaaguccauuug

SEQ ID NO: 378 - RNA, 19 nt, artificial
  Oligomer
cgaaauucugcccuucauu

SEQ ID NO: 379 - RNA, 19 nt, artificial
  Oligomer
cccaguguaucugcauuag

SEQ ID NO: 380 - RNA, 19 nt, artificial
  Oligomer
cagaguuuacccagcacaa

SEQ ID NO: 381 - RNA, 19 nt, artificial
  Oligomer
gcagaguuuacccagcaca

SEQ ID NO: 382 - RNA, 19 nt, artificial
  Oligomer
ucaaaaccggcagaguuua

SEQ ID NO: 383 - RNA, 19 nt, artificial
  Oligomer
ccugaaggauuuucaaaac

SEQ ID NO: 384 - RNA, 19 nt, artificial
  Oligomer
cucagaacauuuucaugaa

SEQ ID NO: 385 - RNA, 19 nt, artificial
  Oligomer
ucuucuuugucuucuacau

SEQ ID NO: 386 - RNA, 19 nt, artificial
  Oligomer
agccucuacauaugcaaua

SEQ ID NO: 387 - RNA, 19 nt, artificial
  Oligomer
ccucaacuucucagugaau

SEQ ID NO: 388 - RNA, 19 nt, artificial
  Oligomer
ggagaaccaggagauuguu

SEQ ID NO: 389 - RNA, 19 nt, artificial
  Oligomer
aaaccaaagagacccugaa

SEQ ID NO: 390 - RNA, 19 nt, artificial
  Oligomer
cgucacauuacauguuuaa

SEQ ID NO: 391 - RNA, 19 nt, artificial
  Oligomer
ggaaaaacaguugguguuu

SEQ ID NO: 392 - RNA, 19 nt, artificial
  Oligomer
ugcagauuuacucuguaug

SEQ ID NO: 393 - RNA, 19 nt, artificial
  Oligomer
uugcagauuuacucuguau

SEQ ID NO: 394 - RNA, 19 nt, artificial
  Oligomer
gucccaguguaucugcauu

SEQ ID NO: 395 - RNA, 19 nt, artificial
  Oligomer
caagaccuggucaguauau

SEQ ID NO: 396 - RNA, 19 nt, artificial
  Oligomer
guauaaccaagggccagag

SEQ ID NO: 397 - RNA, 19 nt, artificial
  Oligomer
cugugccgaaagacuuuac

SEQ ID NO: 398 - RNA, 19 nt, artificial
  Oligomer
uggcuuuggauuucuggac

SEQ ID NO: 399 - RNA, 19 nt, artificial
  Oligomer
gcccagauuccaagcuaau

SEQ ID NO: 400 - RNA, 19 nt, artificial
  Oligomer
agcccagauuccaagcuaa

SEQ ID NO: 401 - RNA, 19 nt, artificial
  Oligomer
agcacaaauuugugaagau

SEQ ID NO: 402 - RNA, 19 nt, artificial
  Oligomer
cccagcacaaauuugugaa

SEQ ID NO: 403 - RNA, 19 nt, artificial
  Oligomer
cucagugaauuacagugaa

SEQ ID NO: 404 - RNA, 19 nt, artificial
  Oligomer
gcaggagaaccaggagauu

SEQ ID NO: 405 - RNA, 19 nt, artificial
  Oligomer
gaacacucuuggcuuaccu

SEQ ID NO: 406 - RNA, 19 nt, artificial
  Oligomer
ggagcugaacuugcucaau

SEQ ID NO: 407 - RNA, 19 nt, artificial
  Oligomer
uggaaaccaaagagacccu

SEQ ID NO: 408 - RNA, 19 nt, artificial
  Oligomer
ccucagcaucuguucuuaa

SEQ ID NO: 409 - RNA, 19 nt, artificial
  Oligomer
ccagcuguaccucagucaa

SEQ ID NO: 410 - RNA, 19 nt, artificial
  Oligomer
gcagauuuacucuguaugu

SEQ ID NO: 411 - RNA, 19 nt, artificial
  Oligomer
uccguugguuugcagauuu

SEQ ID NO: 412 - RNA, 19 nt, artificial
  Oligomer
ugaugguccuuuuggaagu

SEQ ID NO: 413 - RNA, 19 nt, artificial
  Oligomer
cugaaaccaaagcaacauu

SEQ ID NO: 414 - RNA, 19 nt, artificial
  Oligomer
guguccaacugaaaccaaa

SEQ ID NO: 415 - RNA, 19 nt, artificial
  Oligomer
cuuuggauuucuggaccuu

SEQ ID NO: 416 - RNA, 19 nt, artificial
  Oligomer
gugaagauuuguauggaag

SEQ ID NO: 417 - RNA, 19 nt, artificial
  Oligomer
gcacaaauuugugaagauu

SEQ ID NO: 418 - RNA, 19 nt, artificial
  Oligomer
ucagaacauuuucaugaac

SEQ ID NO: 419 - RNA, 19 nt, artificial
  Oligomer
cucucagaauauuuccuua

SEQ ID NO: 420 - RNA, 19 nt, artificial
  Oligomer
cugcuuuucuggaaaaccu

SEQ ID NO: 421 - RNA, 19 nt, artificial
  Oligomer
ggcugcugaaguaucaaac

SEQ ID NO: 422 - RNA, 19 nt, artificial
  Oligomer
guccugcuuuucuggaaaa

SEQ ID NO: 423 - RNA, 19 nt, artificial
  Oligomer
ccucuacauaugcaauaag

SEQ ID NO: 424 - RNA, 19 nt, artificial
  Oligomer
aucuggugaaugcccucaa

SEQ ID NO: 425 - RNA, 19 nt, artificial
  Oligomer
cgaggaucacagaagguuc

SEQ ID NO: 426 - RNA, 19 nt, artificial
  Oligomer
cgaacacucuuggcuuacc

SEQ ID NO: 427 - RNA, 19 nt, artificial
  Oligomer
guuuuugguugaacaaaug

SEQ ID NO: 428 - RNA, 19 nt, artificial
  Oligomer
ugaacuugcucaaucuaag

SEQ ID NO: 429 - RNA, 19 nt, artificial
  Oligomer
ucacuuuucaguucucaaa

SEQ ID NO: 430 - RNA, 19 nt, artificial
  Oligomer
accaaagagacccugaaga

SEQ ID NO: 431 - RNA, 19 nt, artificial
  Oligomer
accgucacauuacauguuu

SEQ ID NO: 432 - RNA, 19 nt, artificial
  Oligomer
gcggaaucaaucagcugug

SEQ ID NO: 433 - RNA, 19 nt, artificial
  Oligomer
ugaaacucagcggaaucaa

SEQ ID NO: 434 - RNA, 19 nt, artificial
  Oligomer
uuaaacaccucugccuguu

SEQ ID NO: 435 - RNA, 19 nt, artificial
  Oligomer
cucagcaucuguucuuaac

SEQ ID NO: 436 - RNA, 19 nt, artificial
  Oligomer
agagaacagaccugacuau

SEQ ID NO: 437 - RNA, 19 nt, artificial
  Oligomer
cagauuuacucuguauguu

SEQ ID NO: 438 - RNA, 19 nt, artificial
  Oligomer
guccuuccguugguuugca

SEQ ID NO: 439 - RNA, 19 nt, artificial
  Oligomer
agcuuagaagacuauacuu

SEQ ID NO: 440 - RNA, 19 nt, artificial
  Oligomer
cccuguuggaugacuggaa

SEQ ID NO: 441 - RNA, 19 nt, artificial
  Oligomer
guccuuuuggaaguccauu

SEQ ID NO: 442 - RNA, 19 nt, artificial
  Oligomer
acuaccuccaccagauguu

SEQ ID NO: 443 - RNA, 19 nt, artificial
  Oligomer
cagaguaucacuaccucca

SEQ ID NO: 444 - RNA, 19 nt, artificial
  Oligomer
ggaccuuugugccuguacu

SEQ ID NO: 445 - RNA, 19 nt, artificial
  Oligomer
cuggaccuuugugccugua

SEQ ID NO: 446 - RNA, 19 nt, artificial
  Oligomer
aagcuaauuuuccacagac

SEQ ID NO: 447 - RNA, 19 nt, artificial
  Oligomer
uccaagcuaauuuuccaca

SEQ ID NO: 448 - RNA, 19 nt, artificial
  Oligomer
cccagauuccaagcuaauu

SEQ ID NO: 449 - RNA, 19 nt, artificial
  Oligomer
ggaagagcccagauuccaa

SEQ ID NO: 450 - RNA, 19 nt, artificial
  Oligomer
ugaagauuuguauggaaga

SEQ ID NO: 451 - RNA, 19 nt, artificial
  Oligomer
agaguuuacccagcacaaa

SEQ ID NO: 452 - RNA, 19 nt, artificial
  Oligomer
auauuuccuuaccagagua

SEQ ID NO: 453 - RNA, 19 nt, artificial
  Oligomer
gcugcugacguugcauguu

SEQ ID NO: 454 - RNA, 19 nt, artificial
  Oligomer
cugguauacucauaaccuc

SEQ ID NO: 455 - RNA, 19 nt, artificial
  Oligomer
cucuacauaugcaauaaga

SEQ ID NO: 456 - RNA, 19 nt, artificial
  Oligomer
ugcagcaagauaccgagau

SEQ ID NO: 457 - RNA, 19 nt, artificial
  Oligomer
ucagugaauuacagugaag

SEQ ID NO: 458 - RNA, 19 nt, artificial
  Oligomer
cugaacuugcucaaucuaa

SEQ ID NO: 459 - RNA, 19 nt, artificial
  Oligomer
gcugaacuugcucaaucua

SEQ ID NO: 460 - RNA, 19 nt, artificial
  Oligomer
uguuuaaucuggaaaccaa

SEQ ID NO: 461 - RNA, 19 nt, artificial
  Oligomer
aacugaguaaccagaacaa

SEQ ID NO: 462 - RNA, 19 nt, artificial
  Oligomer
cucuucauaaacugaguaa

SEQ ID NO: 463 - RNA, 19 nt, artificial
  Oligomer
accugacuaugucaacauc

SEQ ID NO: 464 - RNA, 19 nt, artificial
  Oligomer
uccuuccguugguuugcag

SEQ ID NO: 465 - RNA, 19 nt, artificial
  Oligomer
gauauccaguccuuccguu

SEQ ID NO: 466 - RNA, 19 nt, artificial
  Oligomer
ugacuggaaaccauacaag

SEQ ID NO: 467 - RNA, 19 nt, artificial
  Oligomer
cuagaaauuaucccaagcu

SEQ ID NO: 468 - RNA, 19 nt, artificial
  Oligomer
ucccaguguaucugcauua

SEQ ID NO: 469 - RNA, 19 nt, artificial
  Oligomer
aagaccuggucaguauauu

SEQ ID NO: 470 - RNA, 19 nt, artificial
  Oligomer
ggucauaagucaucccuca

SEQ ID NO: 471 - RNA, 19 nt, artificial
  Oligomer
ucggucauaagucaucccu

SEQ ID NO: 472 - RNA, 19 nt, artificial
  Oligomer
cagucaccaucauuucggu

SEQ ID NO: 473 - RNA, 19 nt, artificial
  Oligomer
ugccuguacugugccgaaa

SEQ ID NO: 474 - RNA, 19 nt, artificial
  Oligomer
agagcccagauuccaagcu

SEQ ID NO: 475 - RNA, 19 nt, artificial
  Oligomer
aggauuuucaaaaccggca

SEQ ID NO: 476 - RNA, 19 nt, artificial
  Oligomer
agaaaacuucucuucacaa

SEQ ID NO: 477 - RNA, 19 nt, artificial
  Oligomer
ugaaugcccucaacuucuc

SEQ ID NO: 478 - RNA, 19 nt, artificial
  Oligomer
uggugaaugcccucaacuu

SEQ ID NO: 479 - RNA, 19 nt, artificial
  Oligomer
ucaucuggcucuccaugaa

SEQ ID NO: 480 - RNA, 19 nt, artificial
  Oligomer
agcaggagaaccaggagau

SEQ ID NO: 481 - RNA, 19 nt, artificial
  Oligomer
gagcugaacuugcucaauc

SEQ ID NO: 482 - RNA, 19 nt, artificial
  Oligomer
ggauucaagaacucccuag

SEQ ID NO: 483 - RNA, 19 nt, artificial
  Oligomer
guggauucaagaacucccu

SEQ ID NO: 484 - RNA, 19 nt, artificial
  Oligomer
ugauucacuuuucaguucu

SEQ ID NO: 485 - RNA, 19 nt, artificial
  Oligomer
gaccgucacauuacauguu

SEQ ID NO: 486 - RNA, 19 nt, artificial
  Oligomer
ucagcuguguuaugccaaa

SEQ ID NO: 487 - RNA, 19 nt, artificial
  Oligomer
gucuuucagcugaaaacuu

SEQ ID NO: 488 - RNA, 19 nt, artificial
  Oligomer
cagcuguaccucagucaaa

SEQ ID NO: 489 - RNA, 19 nt, artificial
  Oligomer
augucaacauccagcugua

SEQ ID NO: 490 - RNA, 19 nt, artificial
  Oligomer
agaccugacuaugucaaca

SEQ ID NO: 491 - RNA, 19 nt, artificial
  Oligomer
ccaguccuuccguugguuu

SEQ ID NO: 492 - RNA, 19 nt, artificial
  Oligomer
ucaacacccuguuggauga

SEQ ID NO: 493 - RNA, 19 nt, artificial
  Oligomer
ggaguaacuccauuugcau

SEQ ID NO: 494 - RNA, 19 nt, artificial
  Oligomer
cauuggaguaacuccauuu

SEQ ID NO: 495 - RNA, 19 nt, artificial
  Oligomer
ggguuaaacaccucugccu

SEQ ID NO: 496 - RNA, 19 nt, artificial
  Oligomer
uggaaguccauuugaggaa

SEQ ID NO: 497 - RNA, 19 nt, artificial
  Oligomer
aucacuaccuccaccagau

SEQ ID NO: 498 - RNA, 19 nt, artificial
  Oligomer
acugaaaccaaagcaacau

SEQ ID NO: 499 - RNA, 19 nt, artificial
  Oligomer
ucacaauguguccaacuga

SEQ ID NO: 500 - RNA, 19 nt, artificial
  Oligomer
gucaguauauuacucuaca

SEQ ID NO: 501 - RNA, 19 nt, artificial
  Oligomer
uccgaauggucaaagaaaa

SEQ ID NO: 502 - RNA, 19 nt, artificial
  Oligomer
cggucauaagucaucccuc

SEQ ID NO: 503 - RNA, 19 nt, artificial
  Oligomer
cagcacaaauuugugaaga

SEQ ID NO: 504 - RNA, 19 nt, artificial
  Oligomer
ugaaggauuuucaaaaccg

SEQ ID NO: 505 - RNA, 19 nt, artificial
  Oligomer
cugaaggauuuucaaaacc

SEQ ID NO: 506 - RNA, 19 nt, artificial
  Oligomer
ccuuaccagaguauuucuc

SEQ ID NO: 507 - RNA, 19 nt, artificial
  Oligomer
cucagaauauuuccuuacc

SEQ ID NO: 508 - RNA, 19 nt, artificial
  Oligomer
gcugcugaaguaucaaacu

SEQ ID NO: 509 - RNA, 19 nt, artificial
  Oligomer
gguauacucauaaccucuu

SEQ ID NO: 510 - RNA, 19 nt, artificial
  Oligomer
gcucaaucuaaggcugauu

SEQ ID NO: 511 - RNA, 19 nt, artificial
  Oligomer
gaugugaugauucacuuuu

SEQ ID NO: 512 - RNA, 19 nt, artificial
  Oligomer
uguggacccaauucacuau

SEQ ID NO: 513 - RNA, 19 nt, artificial
  Oligomer
ucuguauguugcauaacaa

SEQ ID NO: 514 - RNA, 19 nt, artificial
  Oligomer
ggcauuggaguaacuccau

SEQ ID NO: 515 - RNA, 19 nt, artificial
  Oligomer
gguccuuuuggaaguccau

SEQ ID NO: 516 - RNA, 19 nt, artificial
  Oligomer
ugcauuagaaaaucaucca

SEQ ID NO: 517 - RNA, 19 nt, artificial
  Oligomer
ccaguguaucugcauuaga

SEQ ID NO: 518 - RNA, 19 nt, artificial
  Oligomer
cuacauugucccaguguau

SEQ ID NO: 519 - RNA, 19 nt, artificial
  Oligomer
ggucaguauauuacucuac

SEQ ID NO: 520 - RNA, 19 nt, artificial
  Oligomer
cagguauauccggagcaau

SEQ ID NO: 521 - RNA, 19 nt, artificial
  Oligomer
gcuuuggauuucuggaccu

SEQ ID NO: 522 - RNA, 19 nt, artificial
  Oligomer
ccagcacaaauuugugaag

SEQ ID NO: 523 - RNA, 19 nt, artificial
  Oligomer
gcucucagaauauuuccuu

SEQ ID NO: 524 - RNA, 19 nt, artificial
  Oligomer
ugcugacguugcauguuuc

SEQ ID NO: 525 - RNA, 19 nt, artificial
  Oligomer
acagccucuacauaugcaa

SEQ ID NO: 526 - RNA, 19 nt, artificial
  Oligomer
uccuagaaaacuucucuuc

SEQ ID NO: 527 - RNA, 19 nt, artificial
  Oligomer
gaacugaaugcagcaagau

SEQ ID NO: 528 - RNA, 19 nt, artificial
  Oligomer
cuaucuguauuuucucagg

SEQ ID NO: 529 - RNA, 19 nt, artificial
  Oligomer
ugcucaaucuaaggcugau

SEQ ID NO: 530 - RNA, 19 nt, artificial
  Oligomer
ucccuagugaggagcugaa

SEQ ID NO: 531 - RNA, 19 nt, artificial
  Oligomer
ugaugugaugauucacuuu

SEQ ID NO: 532 - RNA, 19 nt, artificial
  Oligomer
ggcaagaugaccgucacau

SEQ ID NO: 533 - RNA, 19 nt, artificial
  Oligomer
agcuguguuaugccaaaga

SEQ ID NO: 534 - RNA, 19 nt, artificial
  Oligomer
ugcacugaauucaagacug

SEQ ID NO: 535 - RNA, 19 nt, artificial
  Oligomer
agccucagcaucuguucuu

SEQ ID NO: 536 - RNA, 19 nt, artificial
  Oligomer
agcuguaccucagucaaac

SEQ ID NO: 537 - RNA, 19 nt, artificial
  Oligomer
acagaccugacuaugucaa

SEQ ID NO: 538 - RNA, 19 nt, artificial
  Oligomer
uccaguccuuccguugguu

SEQ ID NO: 539 - RNA, 19 nt, artificial
  Oligomer
caaucuagaaauuauccca

SEQ ID NO: 540 - RNA, 19 nt, artificial
  Oligomer
uccgaaauucugcccuuca

SEQ ID NO: 541 - RNA, 19 nt, artificial
  Oligomer
cuccgaaauucugcccuuc

SEQ ID NO: 542 - RNA, 19 nt, artificial
  Oligomer
agauuuacuacugccucca

SEQ ID NO: 543 - RNA, 19 nt, artificial
  Oligomer
cgagauuuacuacugccuc

SEQ ID NO: 544 - RNA, 19 nt, artificial
  Oligomer
ucuacauugucccagugua

SEQ ID NO: 545 - RNA, 19 nt, artificial
  Oligomer
ucauggaaauccgaauggu

SEQ ID NO: 546 - RNA, 19 nt, artificial
  Oligomer
ucccucagaugucauggaa

SEQ ID NO: 547 - RNA, 19 nt, artificial
  Oligomer
accaucauuucggucauaa

SEQ ID NO: 548 - RNA, 19 nt, artificial
  Oligomer
uccggagcaauaagccagu

SEQ ID NO: 549 - RNA, 19 nt, artificial
  Oligomer
acagguauauccggagcaa

SEQ ID NO: 550 - RNA, 19 nt, artificial
  Oligomer
ccacucagucuuugacccu

SEQ ID NO: 551 - RNA, 19 nt, artificial
  Oligomer
gaaccuuucccugaaggau

SEQ ID NO: 552 - RNA, 19 nt, artificial
  Oligomer
cagaacauuuucaugaacc

SEQ ID NO: 553 - RNA, 19 nt, artificial
  Oligomer
ucucagaauauuuccuuac

SEQ ID NO: 554 - RNA, 19 nt, artificial
  Oligomer
auccuagaaaacuucucuu

SEQ ID NO: 555 - RNA, 19 nt, artificial
  Oligomer
ggcucuccaugaauguccu

SEQ ID NO: 556 - RNA, 19 nt, artificial
  Oligomer
ugccgaacacucuuggcuu

SEQ ID NO: 557 - RNA, 19 nt, artificial
  Oligomer
caaaugcaagauugaacaa

SEQ ID NO: 558 - RNA, 19 nt, artificial
  Oligomer
uugaugugaugauucacuu

SEQ ID NO: 559 - RNA, 19 nt, artificial
  Oligomer
ucagcggaaucaaucagcu

SEQ ID NO: 560 - RNA, 19 nt, artificial
  Oligomer
ugaguaaccagaacaacuc

SEQ ID NO: 561 - RNA, 19 nt, artificial
  Oligomer
uccagcuguaccucaguca

SEQ ID NO: 562 - RNA, 19 nt, artificial
  Oligomer
ggcaagagaacagaccuga

SEQ ID NO: 563 - RNA, 19 nt, artificial
  Oligomer
uuccguugguuugcagauu

SEQ ID NO: 564 - RNA, 19 nt, artificial
  Oligomer
ggaugacuggaaaccauac

SEQ ID NO: 565 - RNA, 19 nt, artificial
  Oligomer
acacccuguuggaugacug

SEQ ID NO: 566 - RNA, 19 nt, artificial
  Oligomer
guccauuugaggaaucacu

SEQ ID NO: 567 - RNA, 19 nt, artificial
  Oligomer
ugguccuuuuggaagucca

SEQ ID NO: 568 - RNA, 19 nt, artificial
  Oligomer
agaccuggucaguauauua

SEQ ID NO: 569 - RNA, 19 nt, artificial
  Oligomer
ccgaaccagcucucagaau

SEQ ID NO: 570 - RNA, 19 nt, artificial
  Oligomer
ucagucuuaaccgaaccag

SEQ ID NO: 571 - RNA, 19 nt, artificial
  Oligomer
ggcugcaucagucuuaacc

SEQ ID NO: 572 - RNA, 19 nt, artificial
  Oligomer
uccugcuuuucuggaaaac

SEQ ID NO: 573 - RNA, 19 nt, artificial
  Oligomer
uggugguggugcuauuccu

SEQ ID NO: 574 - RNA, 19 nt, artificial
  Oligomer
ccuagaaaacuucucuuca

SEQ ID NO: 575 - RNA, 19 nt, artificial
  Oligomer
ccgagaugaggauccuaga

SEQ ID NO: 576 - RNA, 19 nt, artificial
  Oligomer
augugaugauucacuuuuc

SEQ ID NO: 577 - RNA, 19 nt, artificial
  Oligomer
agcggaaucaaucagcugu

SEQ ID NO: 578 - RNA, 19 nt, artificial
  Oligomer
agagucuuucagcugaaaa

SEQ ID NO: 579 - RNA, 19 nt, artificial
  Oligomer
acaguugguguuuucuguu

SEQ ID NO: 580 - RNA, 19 nt, artificial
  Oligomer
guccucgguggaaacuuuu

SEQ ID NO: 581 - RNA, 19 nt, artificial
  Oligomer
caagagaacagaccugacu

SEQ ID NO: 582 - RNA, 19 nt, artificial
  Oligomer
gguuugcagauuuacucug

SEQ ID NO: 583 - RNA, 19 nt, artificial
  Oligomer
uggaugacuggaaaccaua

SEQ ID NO: 584 - RNA, 19 nt, artificial
  Oligomer
uggaguaacuccauuugca

SEQ ID NO: 585 - RNA, 19 nt, artificial
  Oligomer
ggaaucacugaacuaugag

SEQ ID NO: 586 - RNA, 19 nt, artificial
  Oligomer
agguauauccggagcaaua

SEQ ID NO: 587 - RNA, 19 nt, artificial
  Oligomer
ccuuucccugaaggauuuu

SEQ ID NO: 588 - RNA, 19 nt, artificial
  Oligomer
ucagaauauuuccuuacca

SEQ ID NO: 589 - RNA, 19 nt, artificial
  Oligomer
ugcuuuucuggaaaaccuu

SEQ ID NO: 590 - RNA, 19 nt, artificial
  Oligomer
ugcaucagucuuaaccgaa

SEQ ID NO: 591 - RNA, 19 nt, artificial
  Oligomer
cugcaucagucuuaaccga

SEQ ID NO: 592 - RNA, 19 nt, artificial
  Oligomer
acaugcugcugacguugca

SEQ ID NO: 593 - RNA, 19 nt, artificial
  Oligomer
accgagaugaggauccuag

SEQ ID NO: 594 - RNA, 19 nt, artificial
  Oligomer
cuguucaucuggcucucca

SEQ ID NO: 595 - RNA, 19 nt, artificial
  Oligomer
aagguuccaagcaggagaa

SEQ ID NO: 596 - RNA, 19 nt, artificial
  Oligomer
cucaaucuaaggcugauug

SEQ ID NO: 597 - RNA, 19 nt, artificial
  Oligomer
uggauucaagaacucccua

SEQ ID NO: 598 - RNA, 19 nt, artificial
  Oligomer
acuguuagaugcacacugu

SEQ ID NO: 599 - RNA, 19 nt, artificial
  Oligomer
cagcuguguuaugccaaag

SEQ ID NO: 600 - RNA, 19 nt, artificial
  Oligomer
gccaugaagcaggacucua

SEQ ID NO: 601 - RNA, 19 nt, artificial
  Oligomer
ucuuucagcugaaaacuuu

SEQ ID NO: 602 - RNA, 19 nt, artificial
  Oligomer
gagucuuucagcugaaaac

SEQ ID NO: 603 - RNA, 19 nt, artificial
  Oligomer
agacuguuuauaggacguc

SEQ ID NO: 604 - RNA, 19 nt, artificial
  Oligomer
cugacuaugucaacaucca

SEQ ID NO: 605 - RNA, 19 nt, artificial
  Oligomer
uggcaagagaacagaccug

SEQ ID NO: 606 - RNA, 19 nt, artificial
  Oligomer
ucaucccucagaugucaug

SEQ ID NO: 607 - RNA, 19 nt, artificial
  Oligomer
gaacauuuucaugaaccuu

SEQ ID NO: 608 - RNA, 19 nt, artificial
  Oligomer
cagccucuacauaugcaau

SEQ ID NO: 609 - RNA, 19 nt, artificial
  Oligomer
cacagccucuacauaugca

SEQ ID NO: 610 - RNA, 19 nt, artificial
  Oligomer
aggagaaccaggagauugu

SEQ ID NO: 611 - RNA, 19 nt, artificial
  Oligomer
gaagguuccaagcaggaga

SEQ ID NO: 612 - RNA, 19 nt, artificial
  Oligomer
cuaagacuuugaaacucag

SEQ ID NO: 613 - RNA, 19 nt, artificial
  Oligomer
aagagucuuucagcugaaa

SEQ ID NO: 614 - RNA, 19 nt, artificial
  Oligomer
gaaaaacaguugguguuuu

SEQ ID NO: 615 - RNA, 19 nt, artificial
  Oligomer
gcaagagaacagaccugac

SEQ ID NO: 616 - RNA, 19 nt, artificial
  Oligomer
ugaacuaugaggucagccu

SEQ ID NO: 617 - RNA, 19 nt, artificial
  Oligomer
cacugaacuaugaggucag

SEQ ID NO: 618 - RNA, 19 nt, artificial
  Oligomer
ucacugaacuaugagguca

SEQ ID NO: 619 - RNA, 19 nt, artificial
  Oligomer
uggaaaaccuucuugcugu

SEQ ID NO: 620 - RNA, 19 nt, artificial
  Oligomer
cagcaagauaccgagauga

SEQ ID NO: 621 - RNA, 19 nt, artificial
  Oligomer
ucaaucuaaggcugauugu

SEQ ID NO: 622 - RNA, 19 nt, artificial
  Oligomer
agaacucccuagugaggag

SEQ ID NO: 623 - RNA, 19 nt, artificial
  Oligomer
cacuuuucaguucucaaau

SEQ ID NO: 624 - RNA, 19 nt, artificial
  Oligomer
ugaugauucacuuuucagu

SEQ ID NO: 625 - RNA, 19 nt, artificial
  Oligomer
agcugaaaacuuuugccau

SEQ ID NO: 626 - RNA, 19 nt, artificial
  Oligomer
cagcugaaaacuuuugcca

SEQ ID NO: 627 - RNA, 19 nt, artificial
  Oligomer
agacucuucauaaacugag

SEQ ID NO: 628 - RNA, 19 nt, artificial
  Oligomer
cuguaccucagucaaacag

SEQ ID NO: 629 - RNA, 19 nt, artificial
  Oligomer
acauccagcuguaccucag

SEQ ID NO: 630 - RNA, 19 nt, artificial
  Oligomer
ucaacauccagcuguaccu

SEQ ID NO: 631 - RNA, 19 nt, artificial
  Oligomer
augacuggaaaccauacaa

SEQ ID NO: 632 - RNA, 19 nt, artificial
  Oligomer
aggcauuggaguaacucca

SEQ ID NO: 633 - RNA, 19 nt, artificial
  Oligomer
acccagcacaaauuuguga

SEQ ID NO: 634 - RNA, 19 nt, artificial
  Oligomer
accgaaccagcucucagaa

SEQ ID NO: 635 - RNA, 19 nt, artificial
  Oligomer
uguccugcuuuucuggaaa

SEQ ID NO: 636 - RNA, 19 nt, artificial
  Oligomer
cuguuagaugcacacuguu

SEQ ID NO: 637 - RNA, 19 nt, artificial
  Oligomer
gaaaacuguuagaugcaca

SEQ ID NO: 638 - RNA, 19 nt, artificial
  Oligomer
ugugaugauucacuuuuca

SEQ ID NO: 639 - RNA, 19 nt, artificial
  Oligomer
acucuucauaaacugagua

SEQ ID NO: 640 - RNA, 19 nt, artificial
  Oligomer
gacucuucauaaacugagu

SEQ ID NO: 641 - RNA, 19 nt, artificial
  Oligomer
cagagccucagcaucuguu

SEQ ID NO: 642 - RNA, 19 nt, artificial
  Oligomer
cuaagcagagccucagcau

SEQ ID NO: 643 - RNA, 19 nt, artificial
  Oligomer
uuggaugacuggaaaccau

SEQ ID NO: 644 - RNA, 19 nt, artificial
  Oligomer
acauuuucaugaaccuuuc

SEQ ID NO: 645 - RNA, 19 nt, artificial
  Oligomer
agaacauuuucaugaaccu

SEQ ID NO: 646 - RNA, 19 nt, artificial
  Oligomer
gauucacuuuucaguucuc

SEQ ID NO: 647 - RNA, 19 nt, artificial
  Oligomer
uggaaauccgaauggucaa

SEQ ID NO: 648 - RNA, 19 nt, artificial
  Oligomer
ucccugaaggauuuucaaa

SEQ ID NO: 649 - RNA, 19 nt, artificial
  Oligomer
ggaucacagaagguuccaa

SEQ ID NO: 650 - RNA, 19 nt, artificial
  Oligomer
cagaauauuuccuuaccag

SEQ ID NO: 651 - RNA, 19 nt, artificial
  Oligomer
aaaaacaguugguguuuuc

SEQ ID NO: 652 - RNA, 19 nt, artificial
  Oligomer
ggcuuuggauuucuggacc

SEQ ID NO: 653 - RNA, 19 nt, artificial
  Oligomer
gucuucuacaugcugcuga

SEQ ID NO: 654 - RNA, 19 nt, artificial
  Oligomer
guugaacugaaugcagcaa

SEQ ID NO: 655 - RNA, 19 nt, artificial
  Oligomer
auguccugcuuuucuggaa

SEQ ID NO: 656 - RNA, 19 nt, artificial
  Oligomer
ugccuguucaucuggcucu

SEQ ID NO: 657 - RNA, 19 nt, artificial
  Oligomer
ucuagauugaaugaagggc

SEQ ID NO: 658 - RNA, 19 nt, artificial
  Oligomer
uugugaggguaaauggaug

SEQ ID NO: 659 - RNA, 19 nt, artificial
  Oligomer
ugugaggguaaauggauga

SEQ ID NO: 660 - RNA, 19 nt, artificial
  Oligomer
auggguaaaaggauaaggc

SEQ ID NO: 661 - RNA, 19 nt, artificial
  Oligomer
aacaggguguugaguauug

SEQ ID NO: 662 - RNA, 19 nt, artificial
  Oligomer
uucuagauugaaugaaggg

SEQ ID NO: 663 - RNA, 19 nt, artificial
  Oligomer
cauuccuucuuuagagucc

SEQ ID NO: 664 - RNA, 19 nt, artificial
  Oligomer
ucaucaaacaaaaguuucc

SEQ ID NO: 665 - RNA, 19 nt, artificial
  Oligomer
uaaaucugcaaaccaacgg

SEQ ID NO: 666 - RNA, 19 nt, artificial
  Oligomer
uagauugaaugaagggcag

SEQ ID NO: 667 - RNA, 19 nt, artificial
  Oligomer
aauguucugagaaauacuc

SEQ ID NO: 668 - RNA, 19 nt, artificial
  Oligomer
aaaagcaggacauucaugg

SEQ ID NO: 669 - RNA, 19 nt, artificial
  Oligomer
cuugacuagauggaggcag

SEQ ID NO: 670 - RNA, 19 nt, artificial
  Oligomer
acuauuuuaagaugaaccc

SEQ ID NO: 671 - RNA, 19 nt, artificial
  Oligomer
uugcuuugguuucaguugg

SEQ ID NO: 672 - RNA, 19 nt, artificial
  Oligomer
auaccuguaaagucuuucg

SEQ ID NO: 673 - RNA, 19 nt, artificial
  Oligomer
uaccuguaaagucuuucgg

SEQ ID NO: 674 - RNA, 19 nt, artificial
  Oligomer
cugccgguuuugaaaaucc

SEQ ID NO: 675 - RNA, 19 nt, artificial
  Oligomer
cuuuuauccaacaaucucc

SEQ ID NO: 676 - RNA, 19 nt, artificial
  Oligomer
augaaaaucaacagugugc

SEQ ID NO: 677 - RNA, 19 nt, artificial
  Oligomer
gugcaugauauuuuucucc

SEQ ID NO: 678 - RNA, 19 nt, artificial
  Oligomer
cuagauugaaugaagggca

SEQ ID NO: 679 - RNA, 19 nt, artificial
  Oligomer
gugaucaugaggaauagca

SEQ ID NO: 680 - RNA, 19 nt, artificial
  Oligomer
aucaaacaaaaguuuccac

SEQ ID NO: 681 - RNA, 19 nt, artificial
  Oligomer
acaggguguugaguauuga

SEQ ID NO: 682 - RNA, 19 nt, artificial
  Oligomer
aaaaggaccaucaauauac

SEQ ID NO: 683 - RNA, 19 nt, artificial
  Oligomer
uugacuagauggaggcagu

SEQ ID NO: 684 - RNA, 19 nt, artificial
  Oligomer
aucguucuguccagucucc

SEQ ID NO: 685 - RNA, 19 nt, artificial
  Oligomer
uucaguuggacacauugug

SEQ ID NO: 686 - RNA, 19 nt, artificial
  Oligomer
uuaagacugaugcagccgg

SEQ ID NO: 687 - RNA, 19 nt, artificial
  Oligomer
cugugaucaugaggaauag

SEQ ID NO: 688 - RNA, 19 nt, artificial
  Oligomer
aggccaggaacaguuguga

SEQ ID NO: 689 - RNA, 19 nt, artificial
  Oligomer
aaguuuucuaggauccuca

SEQ ID NO: 690 - RNA, 19 nt, artificial
  Oligomer
guaauucacugagaaguug

SEQ ID NO: 691 - RNA, 19 nt, artificial
  Oligomer
uuuuauccaacaaucuccu

SEQ ID NO: 692 - RNA, 19 nt, artificial
  Oligomer
cauggguaaaaggauaagg

SEQ ID NO: 693 - RNA, 19 nt, artificial
  Oligomer
auuccuucuuuagaguccu

SEQ ID NO: 694 - RNA, 19 nt, artificial
  Oligomer
ucuuggauagugaauuggg

SEQ ID NO: 695 - RNA, 19 nt, artificial
  Oligomer
uuggauagugaauuggguc

SEQ ID NO: 696 - RNA, 19 nt, artificial
  Oligomer
uugccaaaacuuguuaugc

SEQ ID NO: 697 - RNA, 19 nt, artificial
  Oligomer
cuuagacacaauccuagcc

SEQ ID NO: 698 - RNA, 19 nt, artificial
  Oligomer
aaaucucgaaaucguucug

SEQ ID NO: 699 - RNA, 19 nt, artificial
  Oligomer
aauuuucuuugaccauucg

SEQ ID NO: 700 - RNA, 19 nt, artificial
  Oligomer
uagaggcugugaucaugag

SEQ ID NO: 701 - RNA, 19 nt, artificial
  Oligomer
aauacagauaguaacacca

SEQ ID NO: 702 - RNA, 19 nt, artificial
  Oligomer
aucuugcauuuguucaacc

SEQ ID NO: 703 - RNA, 19 nt, artificial
  Oligomer
aaguucagcuccucacuag

SEQ ID NO: 704 - RNA, 19 nt, artificial
  Oligomer
aacacagcugauugauucc

SEQ ID NO: 705 - RNA, 19 nt, artificial
  Oligomer
acacagcugauugauuccg

SEQ ID NO: 706 - RNA, 19 nt, artificial
  Oligomer
ucaaagucuuagaaauugc

SEQ ID NO: 707 - RNA, 19 nt, artificial
  Oligomer
cuuggauagugaauugggu

SEQ ID NO: 708 - RNA, 19 nt, artificial
  Oligomer
aacaccaacuguuuuuccu

SEQ ID NO: 709 - RNA, 19 nt, artificial
  Oligomer
caucaaacaaaaguuucca

SEQ ID NO: 710 - RNA, 19 nt, artificial
  Oligomer
uaaacagucuugaauucag

SEQ ID NO: 711 - RNA, 19 nt, artificial
  Oligomer
uuucuccaauuaucuucug

SEQ ID NO: 712 - RNA, 19 nt, artificial
  Oligomer
uugaugcaaauggaguuac

SEQ ID NO: 713 - RNA, 19 nt, artificial
  Oligomer
gguaaauggaugauuuucu

SEQ ID NO: 714 - RNA, 19 nt, artificial
  Oligomer
uauaccuguaaagucuuuc

SEQ ID NO: 715 - RNA, 19 nt, artificial
  Oligomer
guugugaagagaaguuuuc

SEQ ID NO: 716 - RNA, 19 nt, artificial
  Oligomer
gagaaguuuucuaggaucc

SEQ ID NO: 717 - RNA, 19 nt, artificial
  Oligomer
auucaguucaacaaagucu

SEQ ID NO: 718 - RNA, 19 nt, artificial
  Oligomer
aaucuugcauuuguucaac

SEQ ID NO: 719 - RNA, 19 nt, artificial
  Oligomer
acauggguaaaaggauaag

SEQ ID NO: 720 - RNA, 19 nt, artificial
  Oligomer
uaaaaggauaaggcugcag

SEQ ID NO: 721 - RNA, 19 nt, artificial
  Oligomer
accuuacuauucuuuggca

SEQ ID NO: 722 - RNA, 19 nt, artificial
  Oligomer
aauugcacucauuccuucu

SEQ ID NO: 723 - RNA, 19 nt, artificial
  Oligomer
uugcacucauuccuucuuu

SEQ ID NO: 724 - RNA, 19 nt, artificial
  Oligomer
acucauuccuucuuuagag

SEQ ID NO: 725 - RNA, 19 nt, artificial
  Oligomer
uuccuucuuuagaguccug

SEQ ID NO: 726 - RNA, 19 nt, artificial
  Oligomer
aguuuaugaagagucuugg

SEQ ID NO: 727 - RNA, 19 nt, artificial
  Oligomer
caguugagguuaagaacag

SEQ ID NO: 728 - RNA, 19 nt, artificial
  Oligomer
agucuuggauagugaauug

SEQ ID NO: 729 - RNA, 19 nt, artificial
  Oligomer
uugagguuaagaacagaug

SEQ ID NO: 730 - RNA, 19 nt, artificial
  Oligomer
uuccucuguuauauuuugc

SEQ ID NO: 731 - RNA, 19 nt, artificial
  Oligomer
ucaaacaaaaguuuccacc

SEQ ID NO: 732 - RNA, 19 nt, artificial
  Oligomer
aaacaaaaguuuccaccga

SEQ ID NO: 733 - RNA, 19 nt, artificial
  Oligomer
cagugcaugauauuuuucu

SEQ ID NO: 734 - RNA, 19 nt, artificial
  Oligomer
uucuccaauuaucuucugu

SEQ ID NO: 735 - RNA, 19 nt, artificial
  Oligomer
ugcuuagacacaauccuag

SEQ ID NO: 736 - RNA, 19 nt, artificial
  Oligomer
caucaauauacagcuuggg

SEQ ID NO: 737 - RNA, 19 nt, artificial
  Oligomer
uaguaaaucucgaaaucgu

SEQ ID NO: 738 - RNA, 19 nt, artificial
  Oligomer
aucucgaaaucguucuguc

SEQ ID NO: 739 - RNA, 19 nt, artificial
  Oligomer
uuucaguuggacacauugu

SEQ ID NO: 740 - RNA, 19 nt, artificial
  Oligomer
uuggacacauugugagggu

SEQ ID NO: 741 - RNA, 19 nt, artificial
  Oligomer
ucuuucggcacaguacagg

SEQ ID NO: 742 - RNA, 19 nt, artificial
  Oligomer
aaaauuagcuuggaaucug

SEQ ID NO: 743 - RNA, 19 nt, artificial
  Oligomer
ggguaucuaaauuaguuug

SEQ ID NO: 744 - RNA, 19 nt, artificial
  Oligomer
uuuucuaggauccucaucu

SEQ ID NO: 745 - RNA, 19 nt, artificial
  Oligomer
uucuaggauccucaucucg

SEQ ID NO: 746 - RNA, 19 nt, artificial
  Oligomer
aagucuucacuguaauuca

SEQ ID NO: 747 - RNA, 19 nt, artificial
  Oligomer
aauuuaaagaggaacacga

SEQ ID NO: 748 - RNA, 19 nt, artificial
  Oligomer
aaauauucuucagggucuc

SEQ ID NO: 749 - RNA, 19 nt, artificial
  Oligomer
guuuccagauuaaacaugu

SEQ ID NO: 750 - RNA, 19 nt, artificial
  Oligomer
gguaaaaggauaaggcugc

SEQ ID NO: 751 - RNA, 19 nt, artificial
  Oligomer
uacuauucuuuggcauaac

SEQ ID NO: 752 - RNA, 19 nt, artificial
  Oligomer
gucuuagaaauugcacuca

SEQ ID NO: 753 - RNA, 19 nt, artificial
  Oligomer
cugaaagacucuuuauugu

SEQ ID NO: 754 - RNA, 19 nt, artificial
  Oligomer
cuugucccauaugaguugu

SEQ ID NO: 755 - RNA, 19 nt, artificial
  Oligomer
gauagugaauuggguccac

SEQ ID NO: 756 - RNA, 19 nt, artificial
  Oligomer
aacaaaaguuuccaccgag

SEQ ID NO: 757 - RNA, 19 nt, artificial
  Oligomer
agugcaugauauuuuucuc

SEQ ID NO: 758 - RNA, 19 nt, artificial
  Oligomer
ugcaugauauuuuucucca

SEQ ID NO: 759 - RNA, 19 nt, artificial
  Oligomer
uucucuugccaaaacuugu

SEQ ID NO: 760 - RNA, 19 nt, artificial
  Oligomer
auaguucagugauuccuca

SEQ ID NO: 761 - RNA, 19 nt, artificial
  Oligomer
aggaccaucaauauacagc

SEQ ID NO: 762 - RNA, 19 nt, artificial
  Oligomer
accaucaauauacagcuug

SEQ ID NO: 763 - RNA, 19 nt, artificial
  Oligomer
uagaguaauauacugacca

SEQ ID NO: 764 - RNA, 19 nt, artificial
  Oligomer
auuuucuuugaccauucgg

SEQ ID NO: 765 - RNA, 19 nt, artificial
  Oligomer
aauuugugcuggguaaacu

SEQ ID NO: 766 - RNA, 19 nt, artificial
  Oligomer
auuugugcuggguaaacuc

SEQ ID NO: 767 - RNA, 19 nt, artificial
  Oligomer
gaggcugugaucaugagga

SEQ ID NO: 768 - RNA, 19 nt, artificial
  Oligomer
aagcaggacauucauggag

SEQ ID NO: 769 - RNA, 19 nt, artificial
  Oligomer
agucuucacuguaauucac

SEQ ID NO: 770 - RNA, 19 nt, artificial
  Oligomer
ucuucacuguaauucacug

SEQ ID NO: 771 - RNA, 19 nt, artificial
  Oligomer
aaccuucugugauccucgg

SEQ ID NO: 772 - RNA, 19 nt, artificial
  Oligomer
guaagccaagaguguucgg

SEQ ID NO: 773 - RNA, 19 nt, artificial
  Oligomer
uucggcacauggguaaaag

SEQ ID NO: 774 - RNA, 19 nt, artificial
  Oligomer
gaauccaccaugaaaauca

SEQ ID NO: 775 - RNA, 19 nt, artificial
  Oligomer
agaaauugcacucauuccu

SEQ ID NO: 776 - RNA, 19 nt, artificial
  Oligomer
auugcacucauuccuucuu

SEQ ID NO: 777 - RNA, 19 nt, artificial
  Oligomer
guauucaaaucuuguccca

SEQ ID NO: 778 - RNA, 19 nt, artificial
  Oligomer
ugagguuaagaacagaugc

SEQ ID NO: 779 - RNA, 19 nt, artificial
  Oligomer
aaacagucuugaauucagu

SEQ ID NO: 780 - RNA, 19 nt, artificial
  Oligomer
caauuaucuucuguauccc

SEQ ID NO: 781 - RNA, 19 nt, artificial
  Oligomer
uguuaugcaacauacagag

SEQ ID NO: 782 - RNA, 19 nt, artificial
  Oligomer
aggacuggauaucucugca

SEQ ID NO: 783 - RNA, 19 nt, artificial
  Oligomer
acccaaauaaaguauaguc

SEQ ID NO: 784 - RNA, 19 nt, artificial
  Oligomer
uuuccagucauccaacagg

SEQ ID NO: 785 - RNA, 19 nt, artificial
  Oligomer
cucugcuuagacacaaucc

SEQ ID NO: 786 - RNA, 19 nt, artificial
  Oligomer
ucugcuuagacacaauccu

SEQ ID NO: 787 - RNA, 19 nt, artificial
  Oligomer
uauugaugcaaauggaguu

SEQ ID NO: 788 - RNA, 19 nt, artificial
  Oligomer
ccaucaauauacagcuugg

SEQ ID NO: 789 - RNA, 19 nt, artificial
  Oligomer
aagggcagaauuucggagu

SEQ ID NO: 790 - RNA, 19 nt, artificial
  Oligomer
ucgaaaucguucuguccag

SEQ ID NO: 791 - RNA, 19 nt, artificial
  Oligomer
accuguaaagucuuucggc

SEQ ID NO: 792 - RNA, 19 nt, artificial
  Oligomer
guuaagacugaugcagccg

SEQ ID NO: 793 - RNA, 19 nt, artificial
  Oligomer
aacgucagcagcauguaga

SEQ ID NO: 794 - RNA, 19 nt, artificial
  Oligomer
uuaugaguauaccagaaga

SEQ ID NO: 795 - RNA, 19 nt, artificial
  Oligomer
auacagauaguaacaccac

SEQ ID NO: 796 - RNA, 19 nt, artificial
  Oligomer
cagauaguaacaccacagg

SEQ ID NO: 797 - RNA, 19 nt, artificial
  Oligomer
uuuauccaacaaucuccug

SEQ ID NO: 798 - RNA, 19 nt, artificial
  Oligomer
ucuugcauuuguucaacca

SEQ ID NO: 799 - RNA, 19 nt, artificial
  Oligomer
caucaaauauucuucaggg

SEQ ID NO: 800 - RNA, 19 nt, artificial
  Oligomer
aucaaauauucuucagggu

SEQ ID NO: 801 - RNA, 19 nt, artificial
  Oligomer
aauauucuucagggucucu

SEQ ID NO: 802 - RNA, 19 nt, artificial
  Oligomer
auucuuuggcauaacacag

SEQ ID NO: 803 - RNA, 19 nt, artificial
  Oligomer
agucuuagaaauugcacuc

SEQ ID NO: 804 - RNA, 19 nt, artificial
  Oligomer
uucauggcaaaaguuuuca

SEQ ID NO: 805 - RNA, 19 nt, artificial
  Oligomer
ugucccauaugaguuguuc

SEQ ID NO: 806 - RNA, 19 nt, artificial
  Oligomer
caccaacuguuuuuccucu

SEQ ID NO: 807 - RNA, 19 nt, artificial
  Oligomer
caaacaaaaguuuccaccg

SEQ ID NO: 808 - RNA, 19 nt, artificial
  Oligomer
agguuaagaacagaugcug

SEQ ID NO: 809 - RNA, 19 nt, artificial
  Oligomer
cucuugccaaaacuuguua

SEQ ID NO: 810 - RNA, 19 nt, artificial
  Oligomer
ugccaaaacuuguuaugca

SEQ ID NO: 811 - RNA, 19 nt, artificial
  Oligomer
uaugcaacauacagaguaa

SEQ ID NO: 812 - RNA, 19 nt, artificial
  Oligomer
aaaggaccaucaauauaca

SEQ ID NO: 813 - RNA, 19 nt, artificial
  Oligomer
guaguaaaucucgaaaucg

SEQ ID NO: 814 - RNA, 19 nt, artificial
  Oligomer
ucucgaaaucguucugucc

SEQ ID NO: 815 - RNA, 19 nt, artificial
  Oligomer
uuuccaugacaucugaggg

SEQ ID NO: 816 - RNA, 19 nt, artificial
  Oligomer
ugguuauacagcaagaagg

SEQ ID NO: 817 - RNA, 19 nt, artificial
  Oligomer
cuucagggaaagguucaug

SEQ ID NO: 818 - RNA, 19 nt, artificial
  Oligomer
guucugagaaauacucugg

SEQ ID NO: 819 - RNA, 19 nt, artificial
  Oligomer
gaaauauucugagagcugg

SEQ ID NO: 820 - RNA, 19 nt, artificial
  Oligomer
uccugaaacaugcaacguc

SEQ ID NO: 821 - RNA, 19 nt, artificial
  Oligomer
auaccagaagauaucauag

SEQ ID NO: 822 - RNA, 19 nt, artificial
  Oligomer
cagaaaagcaggacauuca

SEQ ID NO: 823 - RNA, 19 nt, artificial
  Oligomer
cagaagauaucauaguuag

SEQ ID NO: 824 - RNA, 19 nt, artificial
  Oligomer
aguuagaaacucuuauugc

SEQ ID NO: 825 - RNA, 19 nt, artificial
  Oligomer
uauguagaggcugugauca

SEQ ID NO: 826 - RNA, 19 nt, artificial
  Oligomer
gaaguuuucuaggauccuc

SEQ ID NO: 827 - RNA, 19 nt, artificial
  Oligomer
aacaaagucuucacuguaa

SEQ ID NO: 828 - RNA, 19 nt, artificial
  Oligomer
cacagguaauauggaaugu

SEQ ID NO: 829 - RNA, 19 nt, artificial
  Oligomer
cagguaauauggaauguuc

SEQ ID NO: 830 - RNA, 19 nt, artificial
  Oligomer
acaauuuaaagaggaacac

SEQ ID NO: 831 - RNA, 19 nt, artificial
  Oligomer
auuuaaagaggaacacgac

SEQ ID NO: 832 - RNA, 19 nt, artificial
  Oligomer
aggaacacgacaaucagcc

SEQ ID NO: 833 - RNA, 19 nt, artificial
  Oligomer
accaugaaaaucaacagug

SEQ ID NO: 834 - RNA, 19 nt, artificial
  Oligomer
ugaaaaucaacagugugca

SEQ ID NO: 835 - RNA, 19 nt, artificial
  Oligomer
caaauauucuucagggucu

SEQ ID NO: 836 - RNA, 19 nt, artificial
  Oligomer
aaugugacggucaucuugc

SEQ ID NO: 837 - RNA, 19 nt, artificial
  Oligomer
guaaaaggauaaggcugca

SEQ ID NO: 838 - RNA, 19 nt, artificial
  Oligomer
aaaaggauaaggcugcagu

SEQ ID NO: 839 - RNA, 19 nt, artificial
  Oligomer
aaagucuuagaaauugcac

SEQ ID NO: 840 - RNA, 19 nt, artificial
  Oligomer
aagucuuagaaauugcacu

SEQ ID NO: 841 - RNA, 19 nt, artificial
  Oligomer
ucuuuagaguccugcuuca

SEQ ID NO: 842 - RNA, 19 nt, artificial
  Oligomer
uucagcugaaagacucuuu

SEQ ID NO: 843 - RNA, 19 nt, artificial
  Oligomer
caaaucuugucccauauga

SEQ ID NO: 844 - RNA, 19 nt, artificial
  Oligomer
uugucccauaugaguuguu

SEQ ID NO: 845 - RNA, 19 nt, artificial
  Oligomer
uaugaagagucuuggauag

SEQ ID NO: 846 - RNA, 19 nt, artificial
  Oligomer
gaagagucuuggauaguga

SEQ ID NO: 847 - RNA, 19 nt, artificial
  Oligomer
accaacuguuuuuccucug

SEQ ID NO: 848 - RNA, 19 nt, artificial
  Oligomer
gagguuaagaacagaugcu

SEQ ID NO: 849 - RNA, 19 nt, artificial
  Oligomer
acaaaaguuuccaccgagg

SEQ ID NO: 850 - RNA, 19 nt, artificial
  Oligomer
uaucuucuguaucccaucu

SEQ ID NO: 851 - RNA, 19 nt, artificial
  Oligomer
uuaugcaacauacagagua

SEQ ID NO: 852 - RNA, 19 nt, artificial
  Oligomer
cccaaauaaaguauagucu

SEQ ID NO: 853 - RNA, 19 nt, artificial
  Oligomer
uuacuccaaugccuccagc

SEQ ID NO: 854 - RNA, 19 nt, artificial
  Oligomer
aucaauauacagcuuggga

SEQ ID NO: 855 - RNA, 19 nt, artificial
  Oligomer
ugcuuugguuucaguugga

SEQ ID NO: 856 - RNA, 19 nt, artificial
  Oligomer
agaguaauauacugaccag

SEQ ID NO: 857 - RNA, 19 nt, artificial
  Oligomer
cuuaugaccgaaaugaugg

SEQ ID NO: 858 - RNA, 19 nt, artificial
  Oligomer
uuauugcuccggauauacc

SEQ ID NO: 859 - RNA, 19 nt, artificial
  Oligomer
cacaaagguccagaaaucc

SEQ ID NO: 860 - RNA, 19 nt, artificial
  Oligomer
uauacagcaagaagguuuu

SEQ ID NO: 861 - RNA, 19 nt, artificial
  Oligomer
aagaagagguuaugaguau

SEQ ID NO: 862 - RNA, 19 nt, artificial
  Oligomer
gaagagguuaugaguauac

SEQ ID NO: 863 - RNA, 19 nt, artificial
  Oligomer
guuaugaguauaccagaag

SEQ ID NO: 864 - RNA, 19 nt, artificial
  Oligomer
uaugaguauaccagaagau

SEQ ID NO: 865 - RNA, 19 nt, artificial
  Oligomer
aaagcaggacauucaugga

SEQ ID NO: 866 - RNA, 19 nt, artificial
  Oligomer
aguucaacaaagucuucac

SEQ ID NO: 867 - RNA, 19 nt, artificial
  Oligomer
ucaacaaagucuucacugu

SEQ ID NO: 868 - RNA, 19 nt, artificial
  Oligomer
uguucaaucuugcauuugu

SEQ ID NO: 869 - RNA, 19 nt, artificial
  Oligomer
aauccaccaugaaaaucaa

SEQ ID NO: 870 - RNA, 19 nt, artificial
  Oligomer
aaaucaacagugugcaucu

SEQ ID NO: 871 - RNA, 19 nt, artificial
  Oligomer
auaaggcugcaguugaggu

SEQ ID NO: 872 - RNA, 19 nt, artificial
  Oligomer
aaaucuugucccauaugag

SEQ ID NO: 873 - RNA, 19 nt, artificial
  Oligomer
ucccauaugaguuguucug

SEQ ID NO: 874 - RNA, 19 nt, artificial
  Oligomer
cccauaugaguuguucugg

SEQ ID NO: 875 - RNA, 19 nt, artificial
  Oligomer
caguuuaugaagagucuug

SEQ ID NO: 876 - RNA, 19 nt, artificial
  Oligomer
guccacaacagaaaacacc

SEQ ID NO: 877 - RNA, 19 nt, artificial
  Oligomer
caacagaaaacaccaacug

SEQ ID NO: 878 - RNA, 19 nt, artificial
  Oligomer
guccuauaaacagucuuga

SEQ ID NO: 879 - RNA, 19 nt, artificial
  Oligomer
aacagucuugaauucagug

SEQ ID NO: 880 - RNA, 19 nt, artificial
  Oligomer
ccaauuaucuucuguaucc

SEQ ID NO: 881 - RNA, 19 nt, artificial
  Oligomer
auuaucuucuguaucccau

SEQ ID NO: 882 - RNA, 19 nt, artificial
  Oligomer
caacauacagaguaaaucu

SEQ ID NO: 883 - RNA, 19 nt, artificial
  Oligomer
aaggaccaucaauauacag

SEQ ID NO: 884 - RNA, 19 nt, artificial
  Oligomer
aggcaguaguaaaucucga

SEQ ID NO: 885 - RNA, 19 nt, artificial
  Oligomer
gauuuucuaaugcagauac

SEQ ID NO: 886 - RNA, 19 nt, artificial
  Oligomer
gaguaauauacugaccagg

SEQ ID NO: 887 - RNA, 19 nt, artificial
  Oligomer
agaaauccaaagccaaguc

SEQ ID NO: 888 - RNA, 19 nt, artificial
  Oligomer
aguauaccagaagauauca

SEQ ID NO: 889 - RNA, 19 nt, artificial
  Oligomer
uucaguucaacaaagucuu

SEQ ID NO: 890 - RNA, 19 nt, artificial
  Oligomer
caguucaacaaagucuuca

SEQ ID NO: 891 - RNA, 19 nt, artificial
  Oligomer
uucaacaaagucuucacug

SEQ ID NO: 892 - RNA, 19 nt, artificial
  Oligomer
uacagauaguaacaccaca

SEQ ID NO: 893 - RNA, 19 nt, artificial
  Oligomer
acagauaguaacaccacag

SEQ ID NO: 894 - RNA, 19 nt, artificial
  Oligomer
ucaaucuugcauuuguuca

SEQ ID NO: 895 - RNA, 19 nt, artificial
  Oligomer
uuaaagaggaacacgacaa

SEQ ID NO: 896 - RNA, 19 nt, artificial
  Oligomer
aagaggaacacgacaauca

SEQ ID NO: 897 - RNA, 19 nt, artificial
  Oligomer
caccaugaaaaucaacagu

SEQ ID NO: 898 - RNA, 19 nt, artificial
  Oligomer
acaucaaauauucuucagg

SEQ ID NO: 899 - RNA, 19 nt, artificial
  Oligomer
gccacauucucacauuucc

SEQ ID NO: 900 - RNA, 19 nt, artificial
  Oligomer
aaggauaaggcugcaguug

SEQ ID NO: 901 - RNA, 19 nt, artificial
  Oligomer
caaagucuuagaaauugca

SEQ ID NO: 902 - RNA, 19 nt, artificial
  Oligomer
cauggcaaaaguuuucagc

SEQ ID NO: 903 - RNA, 19 nt, artificial
  Oligomer
uucaaaucuugucccauau

SEQ ID NO: 904 - RNA, 19 nt, artificial
  Oligomer
uuuaugaagagucuuggau

SEQ ID NO: 905 - RNA, 19 nt, artificial
  Oligomer
ugaagagucuuggauagug

SEQ ID NO: 906 - RNA, 19 nt, artificial
  Oligomer
aacuguuuuuccucuguua

SEQ ID NO: 907 - RNA, 19 nt, artificial
  Oligomer
aauuaucuucuguauccca

SEQ ID NO: 908 - RNA, 19 nt, artificial
  Oligomer
uaucccaucuguuugacug

SEQ ID NO: 909 - RNA, 19 nt, artificial
  Oligomer
uggauaucucugcauaccc

SEQ ID NO: 910 - RNA, 19 nt, artificial
  Oligomer
aguuacuccaaugccucca

SEQ ID NO: 911 - RNA, 19 nt, artificial
  Oligomer
ucagugauuccucaaaugg

SEQ ID NO: 912 - RNA, 19 nt, artificial
  Oligomer
guaauauacugaccagguc

SEQ ID NO: 913 - RNA, 19 nt, artificial
  Oligomer
uuugaccauucggauuucc

SEQ ID NO: 914 - RNA, 19 nt, artificial
  Oligomer
augaccgaaaugaugguga

SEQ ID NO: 915 - RNA, 19 nt, artificial
  Oligomer
aaauccaaagccaagucug

SEQ ID NO: 916 - RNA, 19 nt, artificial
  Oligomer
aauccaaagccaagucugu

SEQ ID NO: 917 - RNA, 19 nt, artificial
  Oligomer
aagucuguggaaaauuagc

SEQ ID NO: 918 - RNA, 19 nt, artificial
  Oligomer
uuccauacaaaucuucaca

SEQ ID NO: 919 - RNA, 19 nt, artificial
  Oligomer
auacagcaagaagguuuuc

SEQ ID NO: 920 - RNA, 19 nt, artificial
  Oligomer
acaaagaagagguuaugag

SEQ ID NO: 921 - RNA, 19 nt, artificial
  Oligomer
guuagaaacucuuauugca

SEQ ID NO: 922 - RNA, 19 nt, artificial
  Oligomer
uauggaauguucugcuuuu

SEQ ID NO: 923 - RNA, 19 nt, artificial
  Oligomer
auggaauguucugcuuuua

SEQ ID NO: 924 - RNA, 19 nt, artificial
  Oligomer
caauuuaaagaggaacacg

SEQ ID NO: 925 - RNA, 19 nt, artificial
  Oligomer
aacacgacaaucagccuua

SEQ ID NO: 926 - RNA, 19 nt, artificial
  Oligomer
guucuugaauccaccauga

SEQ ID NO: 927 - RNA, 19 nt, artificial
  Oligomer
cacaucaaauauucuucag

SEQ ID NO: 928 - RNA, 19 nt, artificial
  Oligomer
auuccgcugaguuucaaag

SEQ ID NO: 929 - RNA, 19 nt, artificial
  Oligomer
augaguuguucugguuacu

SEQ ID NO: 930 - RNA, 19 nt, artificial
  Oligomer
cuggauaucucugcauacc

SEQ ID NO: 931 - RNA, 19 nt, artificial
  Oligomer
gaguuacuccaaugccucc

SEQ ID NO: 932 - RNA, 19 nt, artificial
  Oligomer
guuacuccaaugccuccag

SEQ ID NO: 933 - RNA, 19 nt, artificial
  Oligomer
uucagugauuccucaaaug

SEQ ID NO: 934 - RNA, 19 nt, artificial
  Oligomer
uuuucuaaugcagauacac

SEQ ID NO: 935 - RNA, 19 nt, artificial
  Oligomer
auacugaccaggucuugcu

SEQ ID NO: 936 - RNA, 19 nt, artificial
  Oligomer
auccaaagccaagucugug

SEQ ID NO: 937 - RNA, 19 nt, artificial
  Oligomer
aaauauucugagagcuggu

SEQ ID NO: 938 - RNA, 19 nt, artificial
  Oligomer
uguaaugugacggucaucu

SEQ ID NO: 939 - RNA, 19 nt, artificial
  Oligomer
uaaugugacggucaucuug

SEQ ID NO: 940 - RNA, 19 nt, artificial
  Oligomer
uccgcugaguuucaaaguc

SEQ ID NO: 941 - RNA, 19 nt, artificial
  Oligomer
ucauggcaaaaguuuucag

SEQ ID NO: 942 - RNA, 19 nt, artificial
  Oligomer
cacaacagaaaacaccaac

SEQ ID NO: 943 - RNA, 19 nt, artificial
  Oligomer
ucuucuguaucccaucugu

SEQ ID NO: 944 - RNA, 19 nt, artificial
  Oligomer
uguaucccaucuguuugac

SEQ ID NO: 945 - RNA, 19 nt, artificial
  Oligomer
caaagacugaguggaagcc

SEQ ID NO: 946 - RNA, 19 nt, artificial
  Oligomer
auuucggagucuugacuag

SEQ ID NO: 947 - RNA, 19 nt, artificial
  Oligomer
aggaaauauucugagagcu

SEQ ID NO: 948 - RNA, 19 nt, artificial
  Oligomer
aauauucugagagcugguu

SEQ ID NO: 949 - RNA, 19 nt, artificial
  Oligomer
aagacaaagaagagguuau

SEQ ID NO: 950 - RNA, 19 nt, artificial
  Oligomer
cugcuuggaaccuucugug

SEQ ID NO: 951 - RNA, 19 nt, artificial
  Oligomer
cuucauggcaaaaguuuuc

SEQ ID NO: 952 - RNA, 19 nt, artificial
  Oligomer
uccucuguuauauuuugcu

SEQ ID NO: 953 - RNA, 19 nt, artificial
  Oligomer
cuguaucccaucuguuuga

SEQ ID NO: 954 - RNA, 19 nt, artificial
  Oligomer
aucccaucuguuugacuga

SEQ ID NO: 955 - RNA, 19 nt, artificial
  Oligomer
guuggacacauugugaggg

SEQ ID NO: 956 - RNA, 19 nt, artificial
  Oligomer
acauugugaggguaaaugg

SEQ ID NO: 957 - RNA, 19 nt, artificial
  Oligomer
ggauauaccuguaaagucu

SEQ ID NO: 958 - RNA, 19 nt, artificial
  Oligomer
uguucugagaaauacucug

SEQ ID NO: 959 - RNA, 19 nt, artificial
  Oligomer
gugcaucuaacaguuuucu

SEQ ID NO: 960 - RNA, 19 nt, artificial
  Oligomer
gucuugacuagauggaggc

SEQ ID NO: 961 - RNA, 19 nt, artificial
  Oligomer
augauggugacuggcuuau

SEQ ID NO: 962 - RNA, 19 nt, artificial
  Oligomer
gugacuggcuuauugcucc

SEQ ID NO: 963 - RNA, 19 nt, artificial
  Oligomer
aaauccuucagggaaaggu

SEQ ID NO: 964 - RNA, 19 nt, artificial
  Oligomer
uagaagacaaagaagaggu

SEQ ID NO: 965 - RNA, 19 nt, artificial
  Oligomer
augaagggcagaauuucgg

SEQ ID NO: 966 - RNA, 19 nt, artificial
  Oligomer
aaaugauggugacuggcuu

SEQ ID NO: 967 - RNA, 19 nt, artificial
  Oligomer
ugacuggcuuauugcuccg

SEQ ID NO: 968 - RNA, 19 nt, artificial
  Oligomer
aaucugggcucuuccauac

SEQ ID NO: 969 - RNA, 19 nt, artificial
  Oligomer
uuuugaaaauccuucaggg

SEQ ID NO: 970 - RNA, 19 nt, artificial
  Oligomer
uucacugagaaguugaggg

SEQ ID NO: 971 - RNA, 19 nt, artificial
  Oligomer
aagaguguucggcacaugg

SEQ ID NO: 972 - RNA, 19 nt, artificial
  Oligomer
uggauagugaauugggucc

SEQ ID NO: 973 - RNA, 19 nt, artificial
  Oligomer
aauggaguuacuccaaugc

SEQ ID NO: 974 - RNA, 19 nt, artificial
  Oligomer
uuucuagauugaaugaagg

SEQ ID NO: 975 - RNA, 19 nt, artificial
  Oligomer
agguagugauacucuggcc

SEQ ID NO: 976 - RNA, 19 nt, artificial
  Oligomer
caguuggacacauugugag

SEQ ID NO: 977 - RNA, 19 nt, artificial
  Oligomer
ccgaaaugauggugacugg

SEQ ID NO: 978 - RNA, 19 nt, artificial
  Oligomer
cuguggaaaauuagcuugg

SEQ ID NO: 979 - RNA, 19 nt, artificial
  Oligomer
uucugagaaauacucuggu

SEQ ID NO: 980 - RNA, 19 nt, artificial
  Oligomer
uuauugcauauguagaggc

SEQ ID NO: 981 - RNA, 19 nt, artificial
  Oligomer
augaggaauagcaccacca

SEQ ID NO: 982 - RNA, 19 nt, artificial
  Oligomer
gaauguucugcuuuuaucc

SEQ ID NO: 983 - RNA, 19 nt, artificial
  Oligomer
aauguucugcuuuuaucca

SEQ ID NO: 984 - RNA, 19 nt, artificial
  Oligomer
auguucugcuuuuauccaa

SEQ ID NO: 985 - RNA, 19 nt, artificial
  Oligomer
uaagaacagaugcugaggc

SEQ ID NO: 986 - RNA, 19 nt, artificial
  Oligomer
aacuuguuaugcaacauac

SEQ ID NO: 987 - RNA, 19 nt, artificial
  Oligomer
aaauggacuuccaaaagga

SEQ ID NO: 988 - RNA, 19 nt, artificial
  Oligomer
agucuugacuagauggagg

SEQ ID NO: 989 - RNA, 19 nt, artificial
  Oligomer
gagguagugauacucuggc

SEQ ID NO: 990 - RNA, 19 nt, artificial
  Oligomer
aguuggacacauugugagg

SEQ ID NO: 991 - RNA, 19 nt, artificial
  Oligomer
auggaugauuuucuaaugc

SEQ ID NO: 992 - RNA, 19 nt, artificial
  Oligomer
cuuugaccauucggauuuc

SEQ ID NO: 993 - RNA, 19 nt, artificial
  Oligomer
aucugagggaugacuuaug

SEQ ID NO: 994 - RNA, 19 nt, artificial
  Oligomer
ucugagggaugacuuauga

SEQ ID NO: 995 - RNA, 19 nt, artificial
  Oligomer
ugaccgaaaugauggugac

SEQ ID NO: 996 - RNA, 19 nt, artificial
  Oligomer
gauggugacuggcuuauug

SEQ ID NO: 997 - RNA, 19 nt, artificial
  Oligomer
auguucugagaaauacucu

SEQ ID NO: 998 - RNA, 19 nt, artificial
  Oligomer
guucgguuaagacugaugc

SEQ ID NO: 999 - RNA, 19 nt, artificial
  Oligomer
uuaguuugauacuucagca

SEQ ID NO: 1000 - RNA, 19 nt, artificial
  Oligomer
aucaugaggaauagcacca

SEQ ID NO: 1001 - RNA, 19 nt, artificial
  Oligomer
caugaggaauagcaccacc

SEQ ID NO: 1002 - RNA, 19 nt, artificial
  Oligomer
gugaagagaaguuuucuag

SEQ ID NO: 1003 - RNA, 19 nt, artificial
  Oligomer
aauucacugagaaguugag

SEQ ID NO: 1004 - RNA, 19 nt, artificial
  Oligomer
aacaccacagguaauaugg

SEQ ID NO: 1005 - RNA, 19 nt, artificial
  Oligomer
uaaacauguaaugugacgg

SEQ ID NO: 1006 - RNA, 19 nt, artificial
  Oligomer
uauacugaccaggucuugc

SEQ ID NO: 1007 - RNA, 19 nt, artificial
  Oligomer
agucuguggaaaauuagcu

SEQ ID NO: 1008 - RNA, 19 nt, artificial
  Oligomer
ucuguggaaaauuagcuug

SEQ ID NO: 1009 - RNA, 19 nt, artificial
  Oligomer
cucuuccauacaaaucuuc

SEQ ID NO: 1010 - RNA, 19 nt, artificial
  Oligomer
uuugauacuucagcagccc

SEQ ID NO: 1011 - RNA, 19 nt, artificial
  Oligomer
guagaagacaaagaagagg

SEQ ID NO: 1012 - RNA, 19 nt, artificial
  Oligomer
uaauucacugagaaguuga

SEQ ID NO: 1013 - RNA, 19 nt, artificial
  Oligomer
uucugcuuuuauccaacaa

SEQ ID NO: 1014 - RNA, 19 nt, artificial
  Oligomer
cagaugaacaggcagaggu

SEQ ID NO: 1015 - RNA, 19 nt, artificial
  Oligomer
agauugagcaaguucagcu

SEQ ID NO: 1016 - RNA, 19 nt, artificial
  Oligomer
uugagcaaguucagcuccu

SEQ ID NO: 1017 - RNA, 19 nt, artificial
  Oligomer
cagggucucuuugguuucc

SEQ ID NO: 1018 - RNA, 19 nt, artificial
  Oligomer
ugaauuggguccacaacag

SEQ ID NO: 1019 - RNA, 19 nt, artificial
  Oligomer
auguugacauagucagguc

SEQ ID NO: 1020 - RNA, 19 nt, artificial
  Oligomer
gaguauugaugcaaaugga

SEQ ID NO: 1021 - RNA, 19 nt, artificial
  Oligomer
caaauggacuuccaaaagg

SEQ ID NO: 1022 - RNA, 19 nt, artificial
  Oligomer
aaugaagggcagaauuucg

SEQ ID NO: 1023 - RNA, 19 nt, artificial
  Oligomer
cuaaugcagauacacuggg

SEQ ID NO: 1024 - RNA, 19 nt, artificial
  Oligomer
uugugcuggguaaacucug

SEQ ID NO: 1025 - RNA, 19 nt, artificial
  Oligomer
ugugcuggguaaacucugc

SEQ ID NO: 1026 - RNA, 19 nt, artificial
  Oligomer
uaaacucugccgguuuuga

SEQ ID NO: 1027 - RNA, 19 nt, artificial
  Oligomer
guuuugaaaauccuucagg

SEQ ID NO: 1028 - RNA, 19 nt, artificial
  Oligomer
uucaugaaaauguucugag

SEQ ID NO: 1029 - RNA, 19 nt, artificial
  Oligomer
auguagaagacaaagaaga

SEQ ID NO: 1030 - RNA, 19 nt, artificial
  Oligomer
uauugcauauguagaggcu

SEQ ID NO: 1031 - RNA, 19 nt, artificial
  Oligomer
auucacugagaaguugagg

SEQ ID NO: 1032 - RNA, 19 nt, artificial
  Oligomer
aacaaucuccugguucucc

SEQ ID NO: 1033 - RNA, 19 nt, artificial
  Oligomer
uucagggucucuuugguuu

SEQ ID NO: 1034 - RNA, 19 nt, artificial
  Oligomer
uuaaacauguaaugugacg

SEQ ID NO: 1035 - RNA, 19 nt, artificial
  Oligomer
aaacaccaacuguuuuucc

SEQ ID NO: 1036 - RNA, 19 nt, artificial
  Oligomer
cauacagaguaaaucugca

SEQ ID NO: 1037 - RNA, 19 nt, artificial
  Oligomer
auacagaguaaaucugcaa

SEQ ID NO: 1038 - RNA, 19 nt, artificial
  Oligomer
aaugcagauacacugggac

SEQ ID NO: 1039 - RNA, 19 nt, artificial
  Oligomer
auauacugaccaggucuug

SEQ ID NO: 1040 - RNA, 19 nt, artificial
  Oligomer
cucuggcccuugguuauac

SEQ ID NO: 1041 - RNA, 19 nt, artificial
  Oligomer
guaaagucuuucggcacag

SEQ ID NO: 1042 - RNA, 19 nt, artificial
  Oligomer
guccagaaauccaaagcca

SEQ ID NO: 1043 - RNA, 19 nt, artificial
  Oligomer
auuagcuuggaaucugggc

SEQ ID NO: 1044 - RNA, 19 nt, artificial
  Oligomer
uuagcuuggaaucugggcu

SEQ ID NO: 1045 - RNA, 19 nt, artificial
  Oligomer
aucuucacaaauuugugcu

SEQ ID NO: 1046 - RNA, 19 nt, artificial
  Oligomer
uucacaaauuugugcuggg

SEQ ID NO: 1047 - RNA, 19 nt, artificial
  Oligomer
uucacuguaauucacugag

SEQ ID NO: 1048 - RNA, 19 nt, artificial
  Oligomer
aaucuccugguucuccugc

SEQ ID NO: 1049 - RNA, 19 nt, artificial
  Oligomer
agguaagccaagaguguuc

SEQ ID NO: 1050 - RNA, 19 nt, artificial
  Oligomer
auugagcaaguucagcucc

SEQ ID NO: 1051 - RNA, 19 nt, artificial
  Oligomer
agggucucuuugguuucca

SEQ ID NO: 1052 - RNA, 19 nt, artificial
  Oligomer
uuaagaacagaugcugagg

SEQ ID NO: 1053 - RNA, 19 nt, artificial
  Oligomer
uugacugagguacagcugg

SEQ ID NO: 1054 - RNA, 19 nt, artificial
  Oligomer
acauacagaguaaaucugc

SEQ ID NO: 1055 - RNA, 19 nt, artificial
  Oligomer
aaaucugcaaaccaacgga

SEQ ID NO: 1056 - RNA, 19 nt, artificial
  Oligomer
acuuccaaaaggaccauca

SEQ ID NO: 1057 - RNA, 19 nt, artificial
  Oligomer
aauguugcuuugguuucag

SEQ ID NO: 1058 - RNA, 19 nt, artificial
  Oligomer
uuugguuucaguuggacac

SEQ ID NO: 1059 - RNA, 19 nt, artificial
  Oligomer
aagguccagaaauccaaag

SEQ ID NO: 1060 - RNA, 19 nt, artificial
  Oligomer
cuuccauacaaaucuucac

SEQ ID NO: 1061 - RNA, 19 nt, artificial
  Oligomer
aaucuucacaaauuugugc

SEQ ID NO: 1062 - RNA, 19 nt, artificial
  Oligomer
guucaugaaaauguucuga

SEQ ID NO: 1063 - RNA, 19 nt, artificial
  Oligomer
uaaggaaauauucugagag

SEQ ID NO: 1064 - RNA, 19 nt, artificial
  Oligomer
agguuuuccagaaaagcag

SEQ ID NO: 1065 - RNA, 19 nt, artificial
  Oligomer
guuugauacuucagcagcc

SEQ ID NO: 1066 - RNA, 19 nt, artificial
  Oligomer
uuuuccagaaaagcaggac

SEQ ID NO: 1067 - RNA, 19 nt, artificial
  Oligomer
cuuauugcauauguagagg

SEQ ID NO: 1068 - RNA, 19 nt, artificial
  Oligomer
uugagggcauucaccagau

SEQ ID NO: 1069 - RNA, 19 nt, artificial
  Oligomer
gaaccuucugugauccucg

SEQ ID NO: 1070 - RNA, 19 nt, artificial
  Oligomer
gguaagccaagaguguucg

SEQ ID NO: 1071 - RNA, 19 nt, artificial
  Oligomer
cauuuguucaaccaaaaac

SEQ ID NO: 1072 - RNA, 19 nt, artificial
  Oligomer
cuuagauugagcaaguuca

SEQ ID NO: 1073 - RNA, 19 nt, artificial
  Oligomer
uuugagaacugaaaaguga

SEQ ID NO: 1074 - RNA, 19 nt, artificial
  Oligomer
ucuucagggucucuuuggu

SEQ ID NO: 1075 - RNA, 19 nt, artificial
  Oligomer
aaacauguaaugugacggu

SEQ ID NO: 1076 - RNA, 19 nt, artificial
  Oligomer
cacagcugauugauuccgc

SEQ ID NO: 1077 - RNA, 19 nt, artificial
  Oligomer
uugauuccgcugaguuuca

SEQ ID NO: 1078 - RNA, 19 nt, artificial
  Oligomer
aacaggcagagguguuuaa

SEQ ID NO: 1079 - RNA, 19 nt, artificial
  Oligomer
guuaagaacagaugcugag

SEQ ID NO: 1080 - RNA, 19 nt, artificial
  Oligomer
auagucaggucuguucucu

SEQ ID NO: 1081 - RNA, 19 nt, artificial
  Oligomer
aacauacagaguaaaucug

SEQ ID NO: 1082 - RNA, 19 nt, artificial
  Oligomer
ugcaaaccaacggaaggac

SEQ ID NO: 1083 - RNA, 19 nt, artificial
  Oligomer
aaguauagucuucuaagcu

SEQ ID NO: 1084 - RNA, 19 nt, artificial
  Oligomer
uuccagucauccaacaggg

SEQ ID NO: 1085 - RNA, 19 nt, artificial
  Oligomer
aauggacuuccaaaaggac

SEQ ID NO: 1086 - RNA, 19 nt, artificial
  Oligomer
aacaucugguggagguagu

SEQ ID NO: 1087 - RNA, 19 nt, artificial
  Oligomer
uggagguagugauacucug

SEQ ID NO: 1088 - RNA, 19 nt, artificial
  Oligomer
aguacaggcacaaaggucc

SEQ ID NO: 1089 - RNA, 19 nt, artificial
  Oligomer
uacaggcacaaagguccag

SEQ ID NO: 1090 - RNA, 19 nt, artificial
  Oligomer
gucuguggaaaauuagcuu

SEQ ID NO: 1091 - RNA, 19 nt, artificial
  Oligomer
uguggaaaauuagcuugga

SEQ ID NO: 1092 - RNA, 19 nt, artificial
  Oligomer
aauuagcuuggaaucuggg

SEQ ID NO: 1093 - RNA, 19 nt, artificial
  Oligomer
uuggaaucugggcucuucc

SEQ ID NO: 1094 - RNA, 19 nt, artificial
  Oligomer
ucuuccauacaaaucuuca

SEQ ID NO: 1095 - RNA, 19 nt, artificial
  Oligomer
uuugugcuggguaaacucu

SEQ ID NO: 1096 - RNA, 19 nt, artificial
  Oligomer
uacucugguaaggaaauau

SEQ ID NO: 1097 - RNA, 19 nt, artificial
  Oligomer
aacaugcaacgucagcagc

SEQ ID NO: 1098 - RNA, 19 nt, artificial
  Oligomer
gagguuaugaguauaccag

SEQ ID NO: 1099 - RNA, 19 nt, artificial
  Oligomer
ucuuauugcauauguagag

SEQ ID NO: 1100 - RNA, 19 nt, artificial
  Oligomer
aucucgguaucuugcugca

SEQ ID NO: 1101 - RNA, 19 nt, artificial
  Oligomer
cuucacuguaauucacuga

SEQ ID NO: 1102 - RNA, 19 nt, artificial
  Oligomer
uuagauugagcaaguucag

SEQ ID NO: 1103 - RNA, 19 nt, artificial
  Oligomer
uagauugagcaaguucagc

SEQ ID NO: 1104 - RNA, 19 nt, artificial
  Oligomer
uugguuuccagauuaaaca

SEQ ID NO: 1105 - RNA, 19 nt, artificial
  Oligomer
uuguucugguuacucaguu

SEQ ID NO: 1106 - RNA, 19 nt, artificial
  Oligomer
uuacucaguuuaugaagag

SEQ ID NO: 1107 - RNA, 19 nt, artificial
  Oligomer
gauguugacauagucaggu

SEQ ID NO: 1108 - RNA, 19 nt, artificial
  Oligomer
cugcaaaccaacggaagga

SEQ ID NO: 1109 - RNA, 19 nt, artificial
  Oligomer
aacggaaggacuggauauc

SEQ ID NO: 1110 - RNA, 19 nt, artificial
  Oligomer
cuuguaugguuuccaguca

SEQ ID NO: 1111 - RNA, 19 nt, artificial
  Oligomer
agcuugggauaauuucuag

SEQ ID NO: 1112 - RNA, 19 nt, artificial
  Oligomer
uaaugcagauacacuggga

SEQ ID NO: 1113 - RNA, 19 nt, artificial
  Oligomer
aauauacugaccaggucuu

SEQ ID NO: 1114 - RNA, 19 nt, artificial
  Oligomer
ugagggaugacuuaugacc

SEQ ID NO: 1115 - RNA, 19 nt, artificial
  Oligomer
agggaugacuuaugaccga

SEQ ID NO: 1116 - RNA, 19 nt, artificial
  Oligomer
accgaaaugauggugacug

SEQ ID NO: 1117 - RNA, 19 nt, artificial
  Oligomer
uuucggcacaguacaggca

SEQ ID NO: 1118 - RNA, 19 nt, artificial
  Oligomer
agcuuggaaucugggcucu

SEQ ID NO: 1119 - RNA, 19 nt, artificial
  Oligomer
ugccgguuuugaaaauccu

SEQ ID NO: 1120 - RNA, 19 nt, artificial
  Oligomer
uugugaagagaaguuuucu

SEQ ID NO: 1121 - RNA, 19 nt, artificial
  Oligomer
gagaaguugagggcauuca

SEQ ID NO: 1122 - RNA, 19 nt, artificial
  Oligomer
aaguugagggcauucacca

SEQ ID NO: 1123 - RNA, 19 nt, artificial
  Oligomer
uucauggagagccagauga

SEQ ID NO: 1124 - RNA, 19 nt, artificial
  Oligomer
aucuccugguucuccugcu

SEQ ID NO: 1125 - RNA, 19 nt, artificial
  Oligomer
gauugagcaaguucagcuc

SEQ ID NO: 1126 - RNA, 19 nt, artificial
  Oligomer
cuagggaguucuugaaucc

SEQ ID NO: 1127 - RNA, 19 nt, artificial
  Oligomer
agggaguucuugaauccac

SEQ ID NO: 1128 - RNA, 19 nt, artificial
  Oligomer
agaacugaaaagugaauca

SEQ ID NO: 1129 - RNA, 19 nt, artificial
  Oligomer
aacauguaaugugacgguc

SEQ ID NO: 1130 - RNA, 19 nt, artificial
  Oligomer
uuuggcauaacacagcuga

SEQ ID NO: 1131 - RNA, 19 nt, artificial
  Oligomer
aaguuuucagcugaaagac

SEQ ID NO: 1132 - RNA, 19 nt, artificial
  Oligomer
uuugacugagguacagcug

SEQ ID NO: 1133 - RNA, 19 nt, artificial
  Oligomer
uacagcuggauguugacau

SEQ ID NO: 1134 - RNA, 19 nt, artificial
  Oligomer
uguugacauagucaggucu

SEQ ID NO: 1135 - RNA, 19 nt, artificial
  Oligomer
aaaccaacggaaggacugg

SEQ ID NO: 1136 - RNA, 19 nt, artificial
  Oligomer
ucauccaacaggguguuga

SEQ ID NO: 1137 - RNA, 19 nt, artificial
  Oligomer
augcaaauggaguuacucc

SEQ ID NO: 1138 - RNA, 19 nt, artificial
  Oligomer
aaauggaguuacuccaaug

SEQ ID NO: 1139 - RNA, 19 nt, artificial
  Oligomer
aggcagagguguuuaaccc

SEQ ID NO: 1140 - RNA, 19 nt, artificial
  Oligomer
uuccucaaauggacuucca

SEQ ID NO: 1141 - RNA, 19 nt, artificial
  Oligomer
aucugguggagguagugau

SEQ ID NO: 1142 - RNA, 19 nt, artificial
  Oligomer
auguugcuuugguuucagu

SEQ ID NO: 1143 - RNA, 19 nt, artificial
  Oligomer
ucaguuggacacauuguga

SEQ ID NO: 1144 - RNA, 19 nt, artificial
  Oligomer
uguagaguaauauacugac

SEQ ID NO: 1145 - RNA, 19 nt, artificial
  Oligomer
uuuucuuugaccauucgga

SEQ ID NO: 1146 - RNA, 19 nt, artificial
  Oligomer
gagggaugacuuaugaccg

SEQ ID NO: 1147 - RNA, 19 nt, artificial
  Oligomer
ucuucacaaauuugugcug

SEQ ID NO: 1148 - RNA, 19 nt, artificial
  Oligomer
cgguuuugaaaauccuuca

SEQ ID NO: 1149 - RNA, 19 nt, artificial
  Oligomer
gguuuugaaaauccuucag

SEQ ID NO: 1150 - RNA, 19 nt, artificial
  Oligomer
gagaaauacucugguaagg

SEQ ID NO: 1151 - RNA, 19 nt, artificial
  Oligomer
gguaaggaaauauucugag

SEQ ID NO: 1152 - RNA, 19 nt, artificial
  Oligomer
aguuugauacuucagcagc

SEQ ID NO: 1153 - RNA, 19 nt, artificial
  Oligomer
aagagguuaugaguauacc

SEQ ID NO: 1154 - RNA, 19 nt, artificial
  Oligomer
aaucagccuuagauugagc

SEQ ID NO: 1155 - RNA, 19 nt, artificial
  Oligomer
aaaagugaaucaucacauc

SEQ ID NO: 1156 - RNA, 19 nt, artificial
  Oligomer
auagugaauuggguccaca

SEQ ID NO: 1157 - RNA, 19 nt, artificial
  Oligomer
uuguuaugcaacauacaga

SEQ ID NO: 1158 - RNA, 19 nt, artificial
  Oligomer
auggaguuacuccaaugcc

SEQ ID NO: 1159 - RNA, 19 nt, artificial
  Oligomer
auggacuuccaaaaggacc

SEQ ID NO: 1160 - RNA, 19 nt, artificial
  Oligomer
uggaugauuuucuaaugca

SEQ ID NO: 1161 - RNA, 19 nt, artificial
  Oligomer
ucuaaugcagauacacugg

SEQ ID NO: 1162 - RNA, 19 nt, artificial
  Oligomer
auacacugggacaauguag

SEQ ID NO: 1163 - RNA, 19 nt, artificial
  Oligomer
guagaguaauauacugacc

SEQ ID NO: 1164 - RNA, 19 nt, artificial
  Oligomer
auugcuccggauauaccug

SEQ ID NO: 1165 - RNA, 19 nt, artificial
  Oligomer
agguccagaaauccaaagc

SEQ ID NO: 1166 - RNA, 19 nt, artificial
  Oligomer
cuucacaaauuugugcugg

SEQ ID NO: 1167 - RNA, 19 nt, artificial
  Oligomer
aaggaaauauucugagagc

SEQ ID NO: 1168 - RNA, 19 nt, artificial
  Oligomer
gaaacaugcaacgucagca

SEQ ID NO: 1169 - RNA, 19 nt, artificial
  Oligomer
uugcauauguagaggcugu

SEQ ID NO: 1170 - RNA, 19 nt, artificial
  Oligomer
gaagagaaguuuucuagga

SEQ ID NO: 1171 - RNA, 19 nt, artificial
  Oligomer
aucuugcugcauucaguuc

SEQ ID NO: 1172 - RNA, 19 nt, artificial
  Oligomer
ccugagaaaauacagauag

SEQ ID NO: 1173 - RNA, 19 nt, artificial
  Oligomer
aucagccuuagauugagca

SEQ ID NO: 1174 - RNA, 19 nt, artificial
  Oligomer
uucagcuccucacuaggga

SEQ ID NO: 1175 - RNA, 19 nt, artificial
  Oligomer
aaagugaaucaucacauca

SEQ ID NO: 1176 - RNA, 19 nt, artificial
  Oligomer
augugacggucaucuugcc

SEQ ID NO: 1177 - RNA, 19 nt, artificial
  Oligomer
ucuuuggcauaacacagcu

SEQ ID NO: 1178 - RNA, 19 nt, artificial
  Oligomer
cagucuugaauucagugca

SEQ ID NO: 1179 - RNA, 19 nt, artificial
  Oligomer
aagaacagaugcugaggcu

SEQ ID NO: 1180 - RNA, 19 nt, artificial
  Oligomer
guuugacugagguacagcu

SEQ ID NO: 1181 - RNA, 19 nt, artificial
  Oligomer
uugacauagucaggucugu

SEQ ID NO: 1182 - RNA, 19 nt, artificial
  Oligomer
aaccaacggaaggacugga

SEQ ID NO: 1183 - RNA, 19 nt, artificial
  Oligomer
ugggauaauuucuagauug

SEQ ID NO: 1184 - RNA, 19 nt, artificial
  Oligomer
ugaagggcagaauuucgga

SEQ ID NO: 1185 - RNA, 19 nt, artificial
  Oligomer
gaagggcagaauuucggag

SEQ ID NO: 1186 - RNA, 19 nt, artificial
  Oligomer
uggaggcaguaguaaaucu

SEQ ID NO: 1187 - RNA, 19 nt, artificial
  Oligomer
gaggcaguaguaaaucucg

SEQ ID NO: 1188 - RNA, 19 nt, artificial
  Oligomer
uacacugggacaauguaga

SEQ ID NO: 1189 - RNA, 19 nt, artificial
  Oligomer
accauucggauuuccauga

SEQ ID NO: 1190 - RNA, 19 nt, artificial
  Oligomer
uuccaugacaucugaggga

SEQ ID NO: 1191 - RNA, 19 nt, artificial
  Oligomer
uuaugaccgaaaugauggu

SEQ ID NO: 1192 - RNA, 19 nt, artificial
  Oligomer
acuggcuuauugcuccgga

SEQ ID NO: 1193 - RNA, 19 nt, artificial
  Oligomer
uugcuccggauauaccugu

SEQ ID NO: 1194 - RNA, 19 nt, artificial
  Oligomer
agggucaaagacugagugg

SEQ ID NO: 1195 - RNA, 19 nt, artificial
  Oligomer
auccuucagggaaagguuc

SEQ ID NO: 1196 - RNA, 19 nt, artificial
  Oligomer
gguucaugaaaauguucug

SEQ ID NO: 1197 - RNA, 19 nt, artificial
  Oligomer
guaaggaaauauucugaga

SEQ ID NO: 1198 - RNA, 19 nt, artificial
  Oligomer
aagagaaguuuucuaggau

SEQ ID NO: 1199 - RNA, 19 nt, artificial
  Oligomer
aggacauucauggagagcc

SEQ ID NO: 1200 - RNA, 19 nt, artificial
  Oligomer
aagccaagaguguucggca

SEQ ID NO: 1201 - RNA, 19 nt, artificial
  Oligomer
uuguucaaucuugcauuug

SEQ ID NO: 1202 - RNA, 19 nt, artificial
  Oligomer
aagugaaucaucacaucaa

SEQ ID NO: 1203 - RNA, 19 nt, artificial
  Oligomer
agcugauugauuccgcuga

SEQ ID NO: 1204 - RNA, 19 nt, artificial
  Oligomer
gaguuguucugguuacuca

SEQ ID NO: 1205 - RNA, 19 nt, artificial
  Oligomer
ugacugagguacagcugga

SEQ ID NO: 1206 - RNA, 19 nt, artificial
  Oligomer
ucaggucuguucucuugcc

SEQ ID NO: 1207 - RNA, 19 nt, artificial
  Oligomer
aaucugcaaaccaacggaa

SEQ ID NO: 1208 - RNA, 19 nt, artificial
  Oligomer
guaugguuuccagucaucc

SEQ ID NO: 1209 - RNA, 19 nt, artificial
  Oligomer
cagucauccaacagggugu

SEQ ID NO: 1210 - RNA, 19 nt, artificial
  Oligomer
agugauuccucaaauggac

SEQ ID NO: 1211 - RNA, 19 nt, artificial
  Oligomer
uggacuuccaaaaggacca

SEQ ID NO: 1212 - RNA, 19 nt, artificial
  Oligomer
uaauauacugaccaggucu

SEQ ID NO: 1213 - RNA, 19 nt, artificial
  Oligomer
auucugagagcugguucgg

SEQ ID NO: 1214 - RNA, 19 nt, artificial
  Oligomer
cugguucgguuaagacuga

SEQ ID NO: 1215 - RNA, 19 nt, artificial
  Oligomer
gguuaagacugaugcagcc

SEQ ID NO: 1216 - RNA, 19 nt, artificial
  Oligomer
guuuuccagaaaagcagga

SEQ ID NO: 1217 - RNA, 19 nt, artificial
  Oligomer
aggaauagcaccaccacca

SEQ ID NO: 1218 - RNA, 19 nt, artificial
  Oligomer
ugaagagaaguuuucuagg

SEQ ID NO: 1219 - RNA, 19 nt, artificial
  Oligomer
ucuaggauccucaucucgg

SEQ ID NO: 1220 - RNA, 19 nt, artificial
  Oligomer
gaaaagugaaucaucacau

SEQ ID NO: 1221 - RNA, 19 nt, artificial
  Oligomer
acagcugauugauuccgcu

SEQ ID NO: 1222 - RNA, 19 nt, artificial
  Oligomer
uuuucagcugaaagacucu

SEQ ID NO: 1223 - RNA, 19 nt, artificial
  Oligomer
aacagaaaacaccaacugu

SEQ ID NO: 1224 - RNA, 19 nt, artificial
  Oligomer
aaaaguuuccaccgaggac

SEQ ID NO: 1225 - RNA, 19 nt, artificial
  Oligomer
agucaggucuguucucuug

SEQ ID NO: 1226 - RNA, 19 nt, artificial
  Oligomer
cagaguaaaucugcaaacc

SEQ ID NO: 1227 - RNA, 19 nt, artificial
  Oligomer
uaugguuuccagucaucca

SEQ ID NO: 1228 - RNA, 19 nt, artificial
  Oligomer
ugcaaauggaguuacucca

SEQ ID NO: 1229 - RNA, 19 nt, artificial
  Oligomer
cucauaguucagugauucc

SEQ ID NO: 1230 - RNA, 19 nt, artificial
  Oligomer
uauugcuccggauauaccu

SEQ ID NO: 1231 - RNA, 19 nt, artificial
  Oligomer
aaaauccuucagggaaagg

SEQ ID NO: 1232 - RNA, 19 nt, artificial
  Oligomer
ugguaaggaaauauucuga

SEQ ID NO: 1233 - RNA, 19 nt, artificial
  Oligomer
aagguuuuccagaaaagca

SEQ ID NO: 1234 - RNA, 19 nt, artificial
  Oligomer
uucgguuaagacugaugca

SEQ ID NO: 1235 - RNA, 19 nt, artificial
  Oligomer
ucgguuaagacugaugcag

SEQ ID NO: 1236 - RNA, 19 nt, artificial
  Oligomer
ugcaacgucagcagcaugu

SEQ ID NO: 1237 - RNA, 19 nt, artificial
  Oligomer
cuaggauccucaucucggu

SEQ ID NO: 1238 - RNA, 19 nt, artificial
  Oligomer
uggagagccagaugaacag

SEQ ID NO: 1239 - RNA, 19 nt, artificial
  Oligomer
uucuccugcuuggaaccuu

SEQ ID NO: 1240 - RNA, 19 nt, artificial
  Oligomer
caaucagccuuagauugag

SEQ ID NO: 1241 - RNA, 19 nt, artificial
  Oligomer
uagggaguucuugaaucca

SEQ ID NO: 1242 - RNA, 19 nt, artificial
  Oligomer
acagugugcaucuaacagu

SEQ ID NO: 1243 - RNA, 19 nt, artificial
  Oligomer
cuuuggcauaacacagcug

SEQ ID NO: 1244 - RNA, 19 nt, artificial
  Oligomer
uagaguccugcuucauggc

SEQ ID NO: 1245 - RNA, 19 nt, artificial
  Oligomer
aaaguuuucagcugaaaga

SEQ ID NO: 1246 - RNA, 19 nt, artificial
  Oligomer
guuuucagcugaaagacuc

SEQ ID NO: 1247 - RNA, 19 nt, artificial
  Oligomer
gacguccuauaaacagucu

SEQ ID NO: 1248 - RNA, 19 nt, artificial
  Oligomer
uggauguugacauagucag

SEQ ID NO: 1249 - RNA, 19 nt, artificial
  Oligomer
caggucuguucucuugcca

SEQ ID NO: 1250 - RNA, 19 nt, artificial
  Oligomer
caugacaucugagggauga

SEQ ID NO: 1251 - RNA, 19 nt, artificial
  Oligomer
aagguucaugaaaauguuc

SEQ ID NO: 1252 - RNA, 19 nt, artificial
  Oligomer
auugcauauguagaggcug

SEQ ID NO: 1253 - RNA, 19 nt, artificial
  Oligomer
ugcauauguagaggcugug

SEQ ID NO: 1254 - RNA, 19 nt, artificial
  Oligomer
acaaucuccugguucuccu

SEQ ID NO: 1255 - RNA, 19 nt, artificial
  Oligomer
ucuccugcuuggaaccuuc

SEQ ID NO: 1256 - RNA, 19 nt, artificial
  Oligomer
cugaguuucaaagucuuag

SEQ ID NO: 1257 - RNA, 19 nt, artificial
  Oligomer
uuucagcugaaagacucuu

SEQ ID NO: 1258 - RNA, 19 nt, artificial
  Oligomer
aaaacaccaacuguuuuuc

SEQ ID NO: 1259 - RNA, 19 nt, artificial
  Oligomer
gucaggucuguucucuugc

SEQ ID NO: 1260 - RNA, 19 nt, artificial
  Oligomer
aggcugaccucauaguuca

SEQ ID NO: 1261 - RNA, 19 nt, artificial
  Oligomer
cugaccucauaguucagug

SEQ ID NO: 1262 - RNA, 19 nt, artificial
  Oligomer
ugaccucauaguucaguga

SEQ ID NO: 1263 - RNA, 19 nt, artificial
  Oligomer
acagcaagaagguuuucca

SEQ ID NO: 1264 - RNA, 19 nt, artificial
  Oligomer
ucaucucgguaucuugcug

SEQ ID NO: 1265 - RNA, 19 nt, artificial
  Oligomer
acaaucagccuuagauuga

SEQ ID NO: 1266 - RNA, 19 nt, artificial
  Oligomer
cuccucacuagggaguucu

SEQ ID NO: 1267 - RNA, 19 nt, artificial
  Oligomer
auuugagaacugaaaagug

SEQ ID NO: 1268 - RNA, 19 nt, artificial
  Oligomer
acugaaaagugaaucauca

SEQ ID NO: 1269 - RNA, 19 nt, artificial
  Oligomer
auggcaaaaguuuucagcu

SEQ ID NO: 1270 - RNA, 19 nt, artificial
  Oligomer
uggcaaaaguuuucagcug

SEQ ID NO: 1271 - RNA, 19 nt, artificial
  Oligomer
cucaguuuaugaagagucu

SEQ ID NO: 1272 - RNA, 19 nt, artificial
  Oligomer
cuguuugacugagguacag

SEQ ID NO: 1273 - RNA, 19 nt, artificial
  Oligomer
cugagguacagcuggaugu

SEQ ID NO: 1274 - RNA, 19 nt, artificial
  Oligomer
agguacagcuggauguuga

SEQ ID NO: 1275 - RNA, 19 nt, artificial
  Oligomer
uuguaugguuuccagucau

SEQ ID NO: 1276 - RNA, 19 nt, artificial
  Oligomer
uggaguuacuccaaugccu

SEQ ID NO: 1277 - RNA, 19 nt, artificial
  Oligomer
ucacaaauuugugcugggu

SEQ ID NO: 1278 - RNA, 19 nt, artificial
  Oligomer
uucugagagcugguucggu

SEQ ID NO: 1279 - RNA, 19 nt, artificial
  Oligomer
uuuccagaaaagcaggaca

SEQ ID NO: 1280 - RNA, 19 nt, artificial
  Oligomer
aacagugugcaucuaacag

SEQ ID NO: 1281 - RNA, 19 nt, artificial
  Oligomer
ugugcaucuaacaguuuuc

SEQ ID NO: 1282 - RNA, 19 nt, artificial
  Oligomer
ugaaaagugaaucaucaca

SEQ ID NO: 1283 - RNA, 19 nt, artificial
  Oligomer
uacucaguuuaugaagagu

SEQ ID NO: 1284 - RNA, 19 nt, artificial
  Oligomer
acucaguuuaugaagaguc

SEQ ID NO: 1285 - RNA, 19 nt, artificial
  Oligomer
aacagaugcugaggcucug

SEQ ID NO: 1286 - RNA, 19 nt, artificial
  Oligomer
augcugaggcucugcuuag

SEQ ID NO: 1287 - RNA, 19 nt, artificial
  Oligomer
augguuuccagucauccaa

SEQ ID NO: 1288 - RNA, 19 nt, artificial
  Oligomer
gaaagguucaugaaaaugu

SEQ ID NO: 1289 - RNA, 19 nt, artificial
  Oligomer
agguucaugaaaauguucu

SEQ ID NO: 1290 - RNA, 19 nt, artificial
  Oligomer
gagaacugaaaagugaauc

SEQ ID NO: 1291 - RNA, 19 nt, artificial
  Oligomer
uugaccauucggauuucca

SEQ ID NO: 1292 - RNA, 19 nt, artificial
  Oligomer
uuugaaaauccuucaggga

SEQ ID NO: 1293 - RNA, 19 nt, artificial
  Oligomer
uuggaaccuucugugaucc

SEQ ID NO: 1294 - RNA, 19 nt, artificial
  Oligomer
cugguaaggaaauauucug

SEQ ID NO: 1295 - RNA, 19 nt, artificial
  Oligomer
gaaaacaccaacuguuuuu

SEQ ID NO: 1296 - RNA, 19 nt, artificial
  Oligomer
gguccagaaauccaaagcc

SEQ ID NO: 1297 - RNA, 19 nt, artificial
  Oligomer
ucagcagcauguagaagac

SEQ ID NO: 1298 - RNA, 19 nt, artificial
  Oligomer
uugcugcauucaguucaac

SEQ ID NO: 1299 - RNA, 19 nt, artificial
  Oligomer
uuccagaaaagcaggacau

SEQ ID NO: 1300 - RNA, 19 nt, Artificial
  Oligomer
agagccagaugaacaggca

SEQ ID NO: 1301 - RNA, 21 nt, artificial
  Oligomer
ucauccauuuacccucacaau

SEQ ID NO: 1302 - RNA, 21 nt, artificial
  Oligomer
gggacaagauuugaauacaau

SEQ ID NO: 1303 - RNA, 21 nt, artificial
  Oligomer
gccuuauccuuuuacccaugu

SEQ ID NO: 1304 - RNA, 21 nt, artificial
  Oligomer
gccaaagaauaguaagguuuu

SEQ ID NO: 1305 - RNA, 21 nt, artificial
  Oligomer
ggaaucaaucagcuguguuau

SEQ ID NO: 1306 - RNA, 21 nt, artificial
  Oligomer
cgguggaaacuuuuguuugau

SEQ ID NO: 1307 - RNA, 21 nt, artificial
  Oligomer
ugcccuucauucaaucuagaa

SEQ ID NO: 1308 - RNA, 21 nt, artificial
  Oligomer
ggacagaacgauuucgagauu

SEQ ID NO: 1309 - RNA, 21 nt, artificial
  Oligomer
aucauccauuuacccucacaa

SEQ ID NO: 1310 - RNA, 21 nt, artificial
  Oligomer
gccgaaagacuuuacagguau

SEQ ID NO: 1311 - RNA, 21 nt, artificial
  Oligomer
ggauuuucaaaaccggcagag

SEQ ID NO: 1312 - RNA, 21 nt, artificial
  Oligomer
gcaggacucuaaagaaggaau

SEQ ID NO: 1313 - RNA, 21 nt, artificial
  Oligomer
cccaauucacuauccaagacu

SEQ ID NO: 1314 - RNA, 21 nt, artificial
  Oligomer
gcaucuguucuuaaccucaac

SEQ ID NO: 1315 - RNA, 21 nt, artificial
  Oligomer
acagaacgauuucgagauuua

SEQ ID NO: 1316 - RNA, 21 nt, artificial
  Oligomer
ccgaaagacuuuacagguaua

SEQ ID NO: 1317 - RNA, 21 nt, artificial
  Oligomer
cgagaugaggauccuagaaaa

SEQ ID NO: 1318 - RNA, 21 nt, artificial
  Oligomer
acaacucauaugggacaagau

SEQ ID NO: 1319 - RNA, 21 nt, artificial
  Oligomer
gcauaacaaguuuuggcaaga

SEQ ID NO: 1320 - RNA, 21 nt, artificial
  Oligomer
guaacuccauuugcaucaaua

SEQ ID NO: 1321 - RNA, 21 nt, artificial
  Oligomer
ccaagggccagaguaucacua

SEQ ID NO: 1322 - RNA, 21 nt, artificial
  Oligomer
aucauuucggucauaagucau

SEQ ID NO: 1323 - RNA, 21 nt, artificial
  Oligomer
cgaaagacuuuacagguauau

SEQ ID NO: 1324 - RNA, 21 nt, artificial
  Oligomer
ucaugaucacagccucuacau

SEQ ID NO: 1325 - RNA, 21 nt, artificial
  Oligomer
gugguguuacuaucuguauuu

SEQ ID NO: 1326 - RNA, 21 nt, artificial
  Oligomer
ccuuauccuuuuacccaugug

SEQ ID NO: 1327 - RNA, 21 nt, artificial
  Oligomer
ugccaaagaauaguaagguuu

SEQ ID NO: 1328 - RNA, 21 nt, artificial
  Oligomer
guguuaugccaaagaauagua

SEQ ID NO: 1329 - RNA, 21 nt, artificial
  Oligomer
ugggacaagauuugaauacaa

SEQ ID NO: 1330 - RNA, 21 nt, artificial
  Oligomer
ccaauucacuauccaagacuc

SEQ ID NO: 1331 - RNA, 21 nt, artificial
  Oligomer
ggagaaaaauaucaugcacug

SEQ ID NO: 1332 - RNA, 21 nt, artificial
  Oligomer
aucaauacucaacacccuguu

SEQ ID NO: 1333 - RNA, 21 nt, artificial
  Oligomer
gaguuuacccagcacaaauuu

SEQ ID NO: 1334 - RNA, 21 nt, artificial
  Oligomer
ucacaacuguuccuggccuga

SEQ ID NO: 1335 - RNA, 21 nt, artificial
  Oligomer
gguguuacuaucuguauuuuc

SEQ ID NO: 1336 - RNA, 21 nt, artificial
  Oligomer
ccaggagauuguuggauaaaa

SEQ ID NO: 1337 - RNA, 21 nt, artificial
  Oligomer
ugguugaacaaaugcaagauu

SEQ ID NO: 1338 - RNA, 21 nt, artificial
  Oligomer
aaagaaggaaugagugcaauu

SEQ ID NO: 1339 - RNA, 21 nt, artificial
  Oligomer
cuaaagaaggaaugagugcaa

SEQ ID NO: 1340 - RNA, 21 nt, artificial
  Oligomer
gacccaauucacuauccaaga

SEQ ID NO: 1341 - RNA, 21 nt, artificial
  Oligomer
cuguauauugaugguccuuuu

SEQ ID NO: 1342 - RNA, 21 nt, artificial
  Oligomer
cugcccuucauucaaucuaga

SEQ ID NO: 1343 - RNA, 21 nt, artificial
  Oligomer
cuacugccuccaucuagucaa

SEQ ID NO: 1344 - RNA, 21 nt, artificial
  Oligomer
ggagacuggacagaacgauuu

SEQ ID NO: 1345 - RNA, 21 nt, artificial
  Oligomer
ggguucaucuuaaaauaguag

SEQ ID NO: 1346 - RNA, 21 nt, artificial
  Oligomer
ccgaauggucaaagaaaauuu

SEQ ID NO: 1347 - RNA, 21 nt, artificial
  Oligomer
ccagauuccaagcuaauuuuc

SEQ ID NO: 1348 - RNA, 21 nt, artificial
  Oligomer
gaaaaccuucuugcuguauaa

SEQ ID NO: 1349 - RNA, 21 nt, artificial
  Oligomer
aaacuucucuucacaacuguu

SEQ ID NO: 1350 - RNA, 21 nt, artificial
  Oligomer
agccuuauccuuuuacccaug

SEQ ID NO: 1351 - RNA, 21 nt, artificial
  Oligomer
cggaaucaaucagcuguguua

SEQ ID NO: 1352 - RNA, 21 nt, artificial
  Oligomer
ugagugcaauuucuaagacuu

SEQ ID NO: 1353 - RNA, 21 nt, artificial
  Oligomer
ggacucuaaagaaggaaugag

SEQ ID NO: 1354 - RNA, 21 nt, artificial
  Oligomer
ccagaacaacucauaugggac

SEQ ID NO: 1355 - RNA, 21 nt, artificial
  Oligomer
guggaaacuuuuguuugauga

SEQ ID NO: 1356 - RNA, 21 nt, artificial
  Oligomer
cgauuucgagauuuacuacug

SEQ ID NO: 1357 - RNA, 21 nt, artificial
  Oligomer
caaacuaauuuagauacccac

SEQ ID NO: 1358 - RNA, 21 nt, artificial
  Oligomer
ccucaugaucacagccucuac

SEQ ID NO: 1359 - RNA, 21 nt, artificial
  Oligomer
gaagacuuuguugaacugaau

SEQ ID NO: 1360 - RNA, 21 nt, artificial
  Oligomer
guauuuucucaggcgugcaug

SEQ ID NO: 1361 - RNA, 21 nt, artificial
  Oligomer
cuguauuuucucaggcgugca

SEQ ID NO: 1362 - RNA, 21 nt, artificial
  Oligomer
cguguuccucuuuaaauuguu

SEQ ID NO: 1363 - RNA, 21 nt, artificial
  Oligomer
caaagagacccugaagaauau

SEQ ID NO: 1364 - RNA, 21 nt, artificial
  Oligomer
agaaggaaugagugcaauuuc

SEQ ID NO: 1365 - RNA, 21 nt, artificial
  Oligomer
aggacucuaaagaaggaauga

SEQ ID NO: 1366 - RNA, 21 nt, artificial
  Oligomer
agaacaacucauaugggacaa

SEQ ID NO: 1367 - RNA, 21 nt, artificial
  Oligomer
gguggaaacuuuuguuugaug

SEQ ID NO: 1368 - RNA, 21 nt, artificial
  Oligomer
cacugaauucaagacuguuua

SEQ ID NO: 1369 - RNA, 21 nt, artificial
  Oligomer
uaacaaguuuuggcaagagaa

SEQ ID NO: 1370 - RNA, 21 nt, artificial
  Oligomer
gaguaacuccauuugcaucaa

SEQ ID NO: 1371 - RNA, 21 nt, artificial
  Oligomer
agcuguauauugaugguccuu

SEQ ID NO: 1372 - RNA, 21 nt, artificial
  Oligomer
gacagaacgauuucgagauuu

SEQ ID NO: 1373 - RNA, 21 nt, artificial
  Oligomer
cuaugauaucuucugguauac

SEQ ID NO: 1374 - RNA, 21 nt, artificial
  Oligomer
gugaauuacagugaagacuuu

SEQ ID NO: 1375 - RNA, 21 nt, artificial
  Oligomer
agugaauuacagugaagacuu

SEQ ID NO: 1376 - RNA, 21 nt, artificial
  Oligomer
ccugugguguuacuaucugua

SEQ ID NO: 1377 - RNA, 21 nt, artificial
  Oligomer
caggagauuguuggauaaaag

SEQ ID NO: 1378 - RNA, 21 nt, artificial
  Oligomer
gguugaacaaaugcaagauug

SEQ ID NO: 1379 - RNA, 21 nt, artificial
  Oligomer
ccuuuuacccaugugccgaac

SEQ ID NO: 1380 - RNA, 21 nt, artificial
  Oligomer
aaagagacccugaagaauauu

SEQ ID NO: 1381 - RNA, 21 nt, artificial
  Oligomer
acauguuuaaucuggaaacca

SEQ ID NO: 1382 - RNA, 21 nt, artificial
  Oligomer
ccaaagaauaguaagguuuuc

SEQ ID NO: 1383 - RNA, 21 nt, artificial
  Oligomer
augccaaagaauaguaagguu

SEQ ID NO: 1384 - RNA, 21 nt, artificial
  Oligomer
gagugcaauuucuaagacuuu

SEQ ID NO: 1385 - RNA, 21 nt, artificial
  Oligomer
caggacucuaaagaaggaaug

SEQ ID NO: 1386 - RNA, 21 nt, artificial
  Oligomer
agcaggacucuaaagaaggaa

SEQ ID NO: 1387 - RNA, 21 nt, artificial
  Oligomer
caauaaagagucuuucagcug

SEQ ID NO: 1388 - RNA, 21 nt, artificial
  Oligomer
caacucauaugggacaagauu

SEQ ID NO: 1389 - RNA, 21 nt, artificial
  Oligomer
ucacuauccaagacucuucau

SEQ ID NO: 1390 - RNA, 21 nt, artificial
  Oligomer
caauucacuauccaagacucu

SEQ ID NO: 1391 - RNA, 21 nt, artificial
  Oligomer
ccucgguggaaacuuuuguuu

SEQ ID NO: 1392 - RNA, 21 nt, artificial
  Oligomer
agauuuacucuguauguugca

SEQ ID NO: 1393 - RNA, 21 nt, artificial
  Oligomer
aguaacuccauuugcaucaau

SEQ ID NO: 1394 - RNA, 21 nt, artificial
  Oligomer
ccauuugaggaaucacugaac

SEQ ID NO: 1395 - RNA, 21 nt, artificial
  Oligomer
gaacgauuucgagauuuacua

SEQ ID NO: 1396 - RNA, 21 nt, artificial
  Oligomer
aggagacuggacagaacgauu

SEQ ID NO: 1397 - RNA, 21 nt, artificial
  Oligomer
guccaacugaaaccaaagcaa

SEQ ID NO: 1398 - RNA, 21 nt, artificial
  Oligomer
ccuggucaguauauuacucua

SEQ ID NO: 1399 - RNA, 21 nt, artificial
  Oligomer
accuucuugcuguauaaccaa

SEQ ID NO: 1400 - RNA, 21 nt, artificial
  Oligomer
ggaaaaccuucuugcuguaua

SEQ ID NO: 1401 - RNA, 21 nt, artificial
  Oligomer
aaaacuucucuucacaacugu

SEQ ID NO: 1402 - RNA, 21 nt, artificial
  Oligomer
ugaauuacagugaagacuuug

SEQ ID NO: 1403 - RNA, 21 nt, artificial
  Oligomer
gaaugcccucaacuucucagu

SEQ ID NO: 1404 - RNA, 21 nt, artificial
  Oligomer
cugugguguuacuaucuguau

SEQ ID NO: 1405 - RNA, 21 nt, artificial
  Oligomer
uugguugaacaaaugcaagau

SEQ ID NO: 1406 - RNA, 21 nt, artificial
  Oligomer
cuguugauuuucaugguggau

SEQ ID NO: 1407 - RNA, 21 nt, artificial
  Oligomer
cagccuuauccuuuuacccau

SEQ ID NO: 1408 - RNA, 21 nt, artificial
  Oligomer
gcuguguuaugccaaagaaua

SEQ ID NO: 1409 - RNA, 21 nt, artificial
  Oligomer
aaggaaugagugcaauuucua

SEQ ID NO: 1410 - RNA, 21 nt, artificial
  Oligomer
uaaagaaggaaugagugcaau

SEQ ID NO: 1411 - RNA, 21 nt, artificial
  Oligomer
gcugaaaacuuuugccaugaa

SEQ ID NO: 1412 - RNA, 21 nt, artificial
  Oligomer
gaacaacucauaugggacaag

SEQ ID NO: 1413 - RNA, 21 nt, artificial
  Oligomer
auaacaaguuuuggcaagaga

SEQ ID NO: 1414 - RNA, 21 nt, artificial
  Oligomer
ugcagagauauccaguccuuc

SEQ ID NO: 1415 - RNA, 21 nt, artificial
  Oligomer
augcagagauauccaguccuu

SEQ ID NO: 1416 - RNA, 21 nt, artificial
  Oligomer
uaacuccauuugcaucaauac

SEQ ID NO: 1417 - RNA, 21 nt, artificial
  Oligomer
ggauugugucuaagcagagcc

SEQ ID NO: 1418 - RNA, 21 nt, artificial
  Oligomer
cagaacgauuucgagauuuac

SEQ ID NO: 1419 - RNA, 21 nt, artificial
  Oligomer
gacuggacagaacgauuucga

SEQ ID NO: 1420 - RNA, 21 nt, artificial
  Oligomer
gagacuggacagaacgauuuc

SEQ ID NO: 1421 - RNA, 21 nt, artificial
  Oligomer
acccucacaauguguccaacu

SEQ ID NO: 1422 - RNA, 21 nt, artificial
  Oligomer
gaaccagcucucagaauauuu

SEQ ID NO: 1423 - RNA, 21 nt, artificial
  Oligomer
guauacucauaaccucuucuu

SEQ ID NO: 1424 - RNA, 21 nt, artificial
  Oligomer
ugauaucuucugguauacuca

SEQ ID NO: 1425 - RNA, 21 nt, artificial
  Oligomer
ccaugaauguccugcuuuucu

SEQ ID NO: 1426 - RNA, 21 nt, artificial
  Oligomer
uccaugaauguccugcuuuuc

SEQ ID NO: 1427 - RNA, 21 nt, artificial
  Oligomer
gcaagauaccgagaugaggau

SEQ ID NO: 1428 - RNA, 21 nt, artificial
  Oligomer
ggagauuguuggauaaaagca

SEQ ID NO: 1429 - RNA, 21 nt, artificial
  Oligomer
uccuuuuacccaugugccgaa

SEQ ID NO: 1430 - RNA, 21 nt, artificial
  Oligomer
agagacccugaagaauauuug

SEQ ID NO: 1431 - RNA, 21 nt, artificial
  Oligomer
gcagccuuauccuuuuaccca

SEQ ID NO: 1432 - RNA, 21 nt, artificial
  Oligomer
aacugcagccuuauccuuuua

SEQ ID NO: 1433 - RNA, 21 nt, artificial
  Oligomer
caacugcagccuuauccuuuu

SEQ ID NO: 1434 - RNA, 21 nt, artificial
  Oligomer
agacuuugaaacucagcggaa

SEQ ID NO: 1435 - RNA, 21 nt, artificial
  Oligomer
gugcaauuucuaagacuuuga

SEQ ID NO: 1436 - RNA, 21 nt, artificial
  Oligomer
gaaugagugcaauuucuaaga

SEQ ID NO: 1437 - RNA, 21 nt, artificial
  Oligomer
auaaagagucuuucagcugaa

SEQ ID NO: 1438 - RNA, 21 nt, artificial
  Oligomer
agaggaaaaacaguugguguu

SEQ ID NO: 1439 - RNA, 21 nt, artificial
  Oligomer
agcaucuguucuuaaccucaa

SEQ ID NO: 1440 - RNA, 21 nt, artificial
  Oligomer
uggagaaaaauaucaugcacu

SEQ ID NO: 1441 - RNA, 21 nt, artificial
  Oligomer
ggguaugcagagauauccagu

SEQ ID NO: 1442 - RNA, 21 nt, artificial
  Oligomer
gcuguauauugaugguccuuu

SEQ ID NO: 1443 - RNA, 21 nt, artificial
  Oligomer
gaaauuaucccaagcuguaua

SEQ ID NO: 1444 - RNA, 21 nt, artificial
  Oligomer
gauuuacuacugccuccaucu

SEQ ID NO: 1445 - RNA, 21 nt, artificial
  Oligomer
auaguaggagacuggacagaa

SEQ ID NO: 1446 - RNA, 21 nt, artificial
  Oligomer
caucuuaaaauaguaggagac

SEQ ID NO: 1447 - RNA, 21 nt, artificial
  Oligomer
cccucagaugucauggaaauc

SEQ ID NO: 1448 - RNA, 21 nt, artificial
  Oligomer
ccagaguauuucucagaacau

SEQ ID NO: 1449 - RNA, 21 nt, artificial
  Oligomer
ugacguugcauguuucaggag

SEQ ID NO: 1450 - RNA, 21 nt, artificial
  Oligomer
ucauaaccucuucuuugucuu

SEQ ID NO: 1451 - RNA, 21 nt, artificial
  Oligomer
cuccaugaauguccugcuuuu

SEQ ID NO: 1452 - RNA, 21 nt, artificial
  Oligomer
accugugguguuacuaucugu

SEQ ID NO: 1453 - RNA, 21 nt, artificial
  Oligomer
gcagaacauuccauauuaccu

SEQ ID NO: 1454 - RNA, 21 nt, artificial
  Oligomer
guugaacaaaugcaagauuga

SEQ ID NO: 1455 - RNA, 21 nt, artificial
  Oligomer
cccugaagaauauuugaugug

SEQ ID NO: 1456 - RNA, 21 nt, artificial
  Oligomer
ggaaugagugcaauuucuaag

SEQ ID NO: 1457 - RNA, 21 nt, artificial
  Oligomer
gaaggaaugagugcaauuucu

SEQ ID NO: 1458 - RNA, 21 nt, artificial
  Oligomer
cucgguggaaacuuuuguuug

SEQ ID NO: 1459 - RNA, 21 nt, artificial
  Oligomer
cagcaucuguucuuaaccuca

SEQ ID NO: 1460 - RNA, 21 nt, artificial
  Oligomer
gggauacagaagauaauugga

SEQ ID NO: 1461 - RNA, 21 nt, artificial
  Oligomer
cagaugggauacagaagauaa

SEQ ID NO: 1462 - RNA, 21 nt, artificial
  Oligomer
acagaugggauacagaagaua

SEQ ID NO: 1463 - RNA, 21 nt, artificial
  Oligomer
uuauuuggguaugcagagaua

SEQ ID NO: 1464 - RNA, 21 nt, artificial
  Oligomer
cuauacuuuauuuggguaugc

SEQ ID NO: 1465 - RNA, 21 nt, artificial
  Oligomer
ccauuugcaucaauacucaac

SEQ ID NO: 1466 - RNA, 21 nt, artificial
  Oligomer
cccuucauucaaucuagaaau

SEQ ID NO: 1467 - RNA, 21 nt, artificial
  Oligomer
uuacccucacaauguguccaa

SEQ ID NO: 1468 - RNA, 21 nt, artificial
  Oligomer
ccaucauuucggucauaaguc

SEQ ID NO: 1469 - RNA, 21 nt, artificial
  Oligomer
gcuuuucuggaaaaccuucuu

SEQ ID NO: 1470 - RNA, 21 nt, artificial
  Oligomer
gagaugaggauccuagaaaac

SEQ ID NO: 1471 - RNA, 21 nt, artificial
  Oligomer
cucuccaugaauguccugcuu

SEQ ID NO: 1472 - RNA, 21 nt, artificial
  Oligomer
ccauauuaccugugguguuac

SEQ ID NO: 1473 - RNA, 21 nt, artificial
  Oligomer
gaacauuccauauuaccugug

SEQ ID NO: 1474 - RNA, 21 nt, artificial
  Oligomer
agaacauuccauauuaccugu

SEQ ID NO: 1475 - RNA, 21 nt, artificial
  Oligomer
gggcuuccacucagucuuuga

SEQ ID NO: 1476 - RNA, 21 nt, artificial
  Oligomer
gaacaaaugcaagauugaaca

SEQ ID NO: 1477 - RNA, 21 nt, artificial
  Oligomer
gucguguuccucuuuaaauug

SEQ ID NO: 1478 - RNA, 21 nt, artificial
  Oligomer
gauugucguguuccucuuuaa

SEQ ID NO: 1479 - RNA, 21 nt, artificial
  Oligomer
cugauugucguguuccucuuu

SEQ ID NO: 1480 - RNA, 21 nt, artificial
  Oligomer
ccuagugaggagcugaacuug

SEQ ID NO: 1481 - RNA, 21 nt, artificial
  Oligomer
ugauuuucaugguggauucaa

SEQ ID NO: 1482 - RNA, 21 nt, artificial
  Oligomer
augcacacuguugauuuucau

SEQ ID NO: 1483 - RNA, 21 nt, artificial
  Oligomer
ggaaaugugagaauguggcaa

SEQ ID NO: 1484 - RNA, 21 nt, artificial
  Oligomer
aggaaugagugcaauuucuaa

SEQ ID NO: 1485 - RNA, 21 nt, artificial
  Oligomer
ccucaacugcagccuuauccu

SEQ ID NO: 1486 - RNA, 21 nt, artificial
  Oligomer
augaagcaggacucuaaagaa

SEQ ID NO: 1487 - RNA, 21 nt, artificial
  Oligomer
ccaugaagcaggacucuaaag

SEQ ID NO: 1488 - RNA, 21 nt, artificial
  Oligomer
aguaaccagaacaacucauau

SEQ ID NO: 1489 - RNA, 21 nt, artificial
  Oligomer
guguuuucuguuguggaccca

SEQ ID NO: 1490 - RNA, 21 nt, artificial
  Oligomer
cagaggaaaaacaguuggugu

SEQ ID NO: 1491 - RNA, 21 nt, artificial
  Oligomer
acagaggaaaaacaguuggug

SEQ ID NO: 1492 - RNA, 21 nt, artificial
  Oligomer
auacuuuauuuggguaugcag

SEQ ID NO: 1493 - RNA, 21 nt, artificial
  Oligomer
gcuggaggcauuggaguaacu

SEQ ID NO: 1494 - RNA, 21 nt, artificial
  Oligomer
uguauauugaugguccuuuug

SEQ ID NO: 1495 - RNA, 21 nt, artificial
  Oligomer
uggacagaacgauuucgagau

SEQ ID NO: 1496 - RNA, 21 nt, artificial
  Oligomer
gaaagacuuuacagguauauc

SEQ ID NO: 1497 - RNA, 21 nt, artificial
  Oligomer
agacuuggcuuuggauuucug

SEQ ID NO: 1498 - RNA, 21 nt, artificial
  Oligomer
cuaacuaugauaucuucuggu

SEQ ID NO: 1499 - RNA, 21 nt, artificial
  Oligomer
gugguggugcuauuccucaug

SEQ ID NO: 1500 - RNA, 21 nt, artificial
  Oligomer
ucuccaugaauguccugcuuu

SEQ ID NO: 1501 - RNA, 21 nt, artificial
  Oligomer
cagugaagacuuuguugaacu

SEQ ID NO: 1502 - RNA, 21 nt, artificial
  Oligomer
uacagugaagacuuuguugaa

SEQ ID NO: 1503 - RNA, 21 nt, artificial
  Oligomer
aagcagaacauuccauauuac

SEQ ID NO: 1504 - RNA, 21 nt, artificial
  Oligomer
guugauuuucaugguggauuc

SEQ ID NO: 1505 - RNA, 21 nt, artificial
  Oligomer
acuguugauuuucauggugga

SEQ ID NO: 1506 - RNA, 21 nt, artificial
  Oligomer
cacacuguugauuuucauggu

SEQ ID NO: 1507 - RNA, 21 nt, artificial
  Oligomer
agaugcacacuguugauuuuc

SEQ ID NO: 1508 - RNA, 21 nt, artificial
  Oligomer
uuagaugcacacuguugauuu

SEQ ID NO: 1509 - RNA, 21 nt, artificial
  Oligomer
uguuagaugcacacuguugau

SEQ ID NO: 1510 - RNA, 21 nt, artificial
  Oligomer
agacccugaagaauauuugau

SEQ ID NO: 1511 - RNA, 21 nt, artificial
  Oligomer
gagacccugaagaauauuuga

SEQ ID NO: 1512 - RNA, 21 nt, artificial
  Oligomer
uggaaaugugagaauguggca

SEQ ID NO: 1513 - RNA, 21 nt, artificial
  Oligomer
ucaacugcagccuuauccuuu

SEQ ID NO: 1514 - RNA, 21 nt, artificial
  Oligomer
gacuuugaaacucagcggaau

SEQ ID NO: 1515 - RNA, 21 nt, artificial
  Oligomer
cauaugggacaagauuugaau

SEQ ID NO: 1516 - RNA, 21 nt, artificial
  Oligomer
ucauaugggacaagauuugaa

SEQ ID NO: 1517 - RNA, 21 nt, artificial
  Oligomer
cucauaugggacaagauuuga

SEQ ID NO: 1518 - RNA, 21 nt, artificial
  Oligomer
uccaagacucuucauaaacug

SEQ ID NO: 1519 - RNA, 21 nt, artificial
  Oligomer
uguuuucuguuguggacccaa

SEQ ID NO: 1520 - RNA, 21 nt, artificial
  Oligomer
caguugguguuuucuguugug

SEQ ID NO: 1521 - RNA, 21 nt, artificial
  Oligomer
ucaagacuguuuauaggacgu

SEQ ID NO: 1522 - RNA, 21 nt, artificial
  Oligomer
gaugggauacagaagauaauu

SEQ ID NO: 1523 - RNA, 21 nt, artificial
  Oligomer
agaugggauacagaagauaau

SEQ ID NO: 1524 - RNA, 21 nt, artificial
  Oligomer
ccaucuagucaagacuccgaa

SEQ ID NO: 1525 - RNA, 21 nt, artificial
  Oligomer
accuggucaguauauuacucu

SEQ ID NO: 1526 - RNA, 21 nt, artificial
  Oligomer
cagacuuggcuuuggauuucu

SEQ ID NO: 1527 - RNA, 21 nt, artificial
  Oligomer
ugaagacuuuguugaacugaa

SEQ ID NO: 1528 - RNA, 21 nt, artificial
  Oligomer
ucaugguggauucaagaacuc

SEQ ID NO: 1529 - RNA, 21 nt, artificial
  Oligomer
ugcacacuguugauuuucaug

SEQ ID NO: 1530 - RNA, 21 nt, artificial
  Oligomer
acccugaagaauauuugaugu

SEQ ID NO: 1531 - RNA, 21 nt, artificial
  Oligomer
gacccugaagaauauuugaug

SEQ ID NO: 1532 - RNA, 21 nt, artificial
  Oligomer
cuauccaagacucuucauaaa

SEQ ID NO: 1533 - RNA, 21 nt, artificial
  Oligomer
acuauccaagacucuucauaa

SEQ ID NO: 1534 - RNA, 21 nt, artificial
  Oligomer
cacuauccaagacucuucaua

SEQ ID NO: 1535 - RNA, 21 nt, artificial
  Oligomer
guguaucugcauuagaaaauc

SEQ ID NO: 1536 - RNA, 21 nt, artificial
  Oligomer
cacagacuuggcuuuggauuu

SEQ ID NO: 1537 - RNA, 21 nt, artificial
  Oligomer
gugaagacuuuguugaacuga

SEQ ID NO: 1538 - RNA, 21 nt, artificial
  Oligomer
auauuaccugugguguuacua

SEQ ID NO: 1539 - RNA, 21 nt, artificial
  Oligomer
ugucguguuccucuuuaaauu

SEQ ID NO: 1540 - RNA, 21 nt, artificial
  Oligomer
ugauugucguguuccucuuua

SEQ ID NO: 1541 - RNA, 21 nt, artificial
  Oligomer
cuaaggcugauugucguguuc

SEQ ID NO: 1542 - RNA, 21 nt, artificial
  Oligomer
ccugaagaauauuugauguga

SEQ ID NO: 1543 - RNA, 21 nt, artificial
  Oligomer
gaaaugugagaauguggcaag

SEQ ID NO: 1544 - RNA, 21 nt, artificial
  Oligomer
cugaaaacuuuugccaugaag

SEQ ID NO: 1545 - RNA, 21 nt, artificial
  Oligomer
ggauacagaagauaauuggag

SEQ ID NO: 1546 - RNA, 21 nt, artificial
  Oligomer
aacagaugggauacagaagau

SEQ ID NO: 1547 - RNA, 21 nt, artificial
  Oligomer
cuggaggcauuggaguaacuc

SEQ ID NO: 1548 - RNA, 21 nt, artificial
  Oligomer
ccagaguaucacuaccuccac

SEQ ID NO: 1549 - RNA, 21 nt, artificial
  Oligomer
caguguaucugcauuagaaaa

SEQ ID NO: 1550 - RNA, 21 nt, artificial
  Oligomer
gaaauccgaauggucaaagaa

SEQ ID NO: 1551 - RNA, 21 nt, artificial
  Oligomer
ggaaauccgaauggucaaaga

SEQ ID NO: 1552 - RNA, 21 nt, artificial
  Oligomer
caauaagccagucaccaucau

SEQ ID NO: 1553 - RNA, 21 nt, artificial
  Oligomer
ccagcucucagaauauuuccu

SEQ ID NO: 1554 - RNA, 21 nt, artificial
  Oligomer
gacuuuguugaacugaaugca

SEQ ID NO: 1555 - RNA, 21 nt, artificial
  Oligomer
agugaagacuuuguugaacug

SEQ ID NO: 1556 - RNA, 21 nt, artificial
  Oligomer
gcucuccaugaauguccugcu

SEQ ID NO: 1557 - RNA, 21 nt, artificial
  Oligomer
gcugauugucguguuccucuu

SEQ ID NO: 1558 - RNA, 21 nt, artificial
  Oligomer
aggcugauugucguguuccuc

SEQ ID NO: 1559 - RNA, 21 nt, artificial
  Oligomer
ucuaaggcugauugucguguu

SEQ ID NO: 1560 - RNA, 21 nt, artificial
  Oligomer
accgucacauuacauguuuaa

SEQ ID NO: 1561 - RNA, 21 nt, artificial
  Oligomer
gucaaacagaugggauacaga

SEQ ID NO: 1562 - RNA, 21 nt, artificial
  Oligomer
ucagucaaacagaugggauac

SEQ ID NO: 1563 - RNA, 21 nt, artificial
  Oligomer
uccuuuuggaaguccauuuga

SEQ ID NO: 1564 - RNA, 21 nt, artificial
  Oligomer
ccauuuacccucacaaugugu

SEQ ID NO: 1565 - RNA, 21 nt, artificial
  Oligomer
aagcaagaccuggucaguaua

SEQ ID NO: 1566 - RNA, 21 nt, artificial
  Oligomer
gcaauaagccagucaccauca

SEQ ID NO: 1567 - RNA, 21 nt, artificial
  Oligomer
cugcugaaguaucaaacuaau

SEQ ID NO: 1568 - RNA, 21 nt, artificial
  Oligomer
gcugcugaaguaucaaacuaa

SEQ ID NO: 1569 - RNA, 21 nt, artificial
  Oligomer
acucauaaccucuucuuuguc

SEQ ID NO: 1570 - RNA, 21 nt, artificial
  Oligomer
ggauaaaagcagaacauucca

SEQ ID NO: 1571 - RNA, 21 nt, artificial
  Oligomer
caagcaggagaaccaggagau

SEQ ID NO: 1572 - RNA, 21 nt, artificial
  Oligomer
aagaugaccgucacauuacau

SEQ ID NO: 1573 - RNA, 21 nt, artificial
  Oligomer
caagaugaccgucacauuaca

SEQ ID NO: 1574 - RNA, 21 nt, artificial
  Oligomer
ugugagaauguggcaagauga

SEQ ID NO: 1575 - RNA, 21 nt, artificial
  Oligomer
gaaauucugcccuucauucaa

SEQ ID NO: 1576 - RNA, 21 nt, artificial
  Oligomer
gguggugcuauuccucaugau

SEQ ID NO: 1577 - RNA, 21 nt, artificial
  Oligomer
ggcugauugucguguuccucu

SEQ ID NO: 1578 - RNA, 21 nt, artificial
  Oligomer
ucaaacagaugggauacagaa

SEQ ID NO: 1579 - RNA, 21 nt, artificial
  Oligomer
cucagucaaacagaugggaua

SEQ ID NO: 1580 - RNA, 21 nt, artificial
  Oligomer
agcaagaccuggucaguauau

SEQ ID NO: 1581 - RNA, 21 nt, artificial
  Oligomer
ccucaacuucucagugaauua

SEQ ID NO: 1582 - RNA, 21 nt, artificial
  Oligomer
cccucaacuucucagugaauu

SEQ ID NO: 1583 - RNA, 21 nt, artificial
  Oligomer
cgaacacucuuggcuuaccuc

SEQ ID NO: 1584 - RNA, 21 nt, artificial
  Oligomer
uccauuugcaucaauacucaa

SEQ ID NO: 1585 - RNA, 21 nt, artificial
  Oligomer
ggcauuggaguaacuccauuu

SEQ ID NO: 1586 - RNA, 21 nt, artificial
  Oligomer
uccgaaauucugcccuucauu

SEQ ID NO: 1587 - RNA, 21 nt, artificial
  Oligomer
ccaagcuaauuuuccacagac

SEQ ID NO: 1588 - RNA, 21 nt, artificial
  Oligomer
ggcugcugaaguaucaaacua

SEQ ID NO: 1589 - RNA, 21 nt, artificial
  Oligomer
cuagaaaacuucucuucacaa

SEQ ID NO: 1590 - RNA, 21 nt, artificial
  Oligomer
gcccucaacuucucagugaau

SEQ ID NO: 1591 - RNA, 21 nt, artificial
  Oligomer
ccaucuggugaaugcccucaa

SEQ ID NO: 1592 - RNA, 21 nt, artificial
  Oligomer
gaaaccaaagagacccugaag

SEQ ID NO: 1593 - RNA, 21 nt, artificial
  Oligomer
gcaucaauacucaacacccug

SEQ ID NO: 1594 - RNA, 21 nt, artificial
  Oligomer
cccucacaauguguccaacug

SEQ ID NO: 1595 - RNA, 21 nt, artificial
  Oligomer
ggucaguauauuacucuacau

SEQ ID NO: 1596 - RNA, 21 nt, artificial
  Oligomer
gucauggaaauccgaaugguc

SEQ ID NO: 1597 - RNA, 21 nt, artificial
  Oligomer
agagcccagauuccaagcuaa

SEQ ID NO: 1598 - RNA, 21 nt, artificial
  Oligomer
cagaguauuucucagaacauu

SEQ ID NO: 1599 - RNA, 21 nt, artificial
  Oligomer
guuggauaaaagcagaacauu

SEQ ID NO: 1600 - RNA, 21 nt, artificial
  Oligomer
uguuggauaaaagcagaacau

SEQ ID NO: 1601 - RNA, 21 nt, artificial
  Oligomer
agauuguuggauaaaagcaga

SEQ ID NO: 1602 - RNA, 21 nt, artificial
  Oligomer
aaccaaagagacccugaagaa

SEQ ID NO: 1603 - RNA, 21 nt, artificial
  Oligomer
gcccuucauucaaucuagaaa

SEQ ID NO: 1604 - RNA, 21 nt, artificial
  Oligomer
ucacaauguguccaacugaaa

SEQ ID NO: 1605 - RNA, 21 nt, artificial
  Oligomer
gucaccaucauuucggucaua

SEQ ID NO: 1606 - RNA, 21 nt, artificial
  Oligomer
caagcuaauuuuccacagacu

SEQ ID NO: 1607 - RNA, 21 nt, artificial
  Oligomer
gaauauuuccuuaccagagua

SEQ ID NO: 1608 - RNA, 21 nt, artificial
  Oligomer
uaaccucuucuuugucuucua

SEQ ID NO: 1609 - RNA, 21 nt, artificial
  Oligomer
guggugcuauuccucaugauc

SEQ ID NO: 1610 - RNA, 21 nt, artificial
  Oligomer
ccuagaaaacuucucuucaca

SEQ ID NO: 1611 - RNA, 21 nt, artificial
  Oligomer
gauuguuggauaaaagcagaa

SEQ ID NO: 1612 - RNA, 21 nt, artificial
  Oligomer
ggaaaccaaagagacccugaa

SEQ ID NO: 1613 - RNA, 21 nt, artificial
  Oligomer
cuccauuugcaucaauacuca

SEQ ID NO: 1614 - RNA, 21 nt, artificial
  Oligomer
gccuccaucuagucaagacuc

SEQ ID NO: 1615 - RNA, 21 nt, artificial
  Oligomer
caagaccuggucaguauauua

SEQ ID NO: 1616 - RNA, 21 nt, artificial
  Oligomer
gaaccuuucccugaaggauuu

SEQ ID NO: 1617 - RNA, 21 nt, artificial
  Oligomer
ccucuucuuugucuucuacau

SEQ ID NO: 1618 - RNA, 21 nt, artificial
  Oligomer
ccgaacacucuuggcuuaccu

SEQ ID NO: 1619 - RNA, 21 nt, artificial
  Oligomer
acccaugugccgaacacucuu

SEQ ID NO: 1620 - RNA, 21 nt, artificial
  Oligomer
gguuugcagauuuacucugua

SEQ ID NO: 1621 - RNA, 21 nt, artificial
  Oligomer
gguccuuuuggaaguccauuu

SEQ ID NO: 1622 - RNA, 21 nt, artificial
  Oligomer
ugccuccaucuagucaagacu

SEQ ID NO: 1623 - RNA, 21 nt, artificial
  Oligomer
gcaagaccuggucaguauauu

SEQ ID NO: 1624 - RNA, 21 nt, artificial
  Oligomer
guauaaccaagggccagagua

SEQ ID NO: 1625 - RNA, 21 nt, artificial
  Oligomer
gcuuuggauuucuggaccuuu

SEQ ID NO: 1626 - RNA, 21 nt, artificial
  Oligomer
cccagauuccaagcuaauuuu

SEQ ID NO: 1627 - RNA, 21 nt, artificial
  Oligomer
cagaguuuacccagcacaaau

SEQ ID NO: 1628 - RNA, 21 nt, artificial
  Oligomer
ggcagaguuuacccagcacaa

SEQ ID NO: 1629 - RNA, 21 nt, artificial
  Oligomer
gcaucagucuuaaccgaacca

SEQ ID NO: 1630 - RNA, 21 nt, artificial
  Oligomer
ccugcuuuucuggaaaaccuu

SEQ ID NO: 1631 - RNA, 21 nt, artificial
  Oligomer
cucuucuuugucuucuacaug

SEQ ID NO: 1632 - RNA, 21 nt, artificial
  Oligomer
accucuucuuugucuucuaca

SEQ ID NO: 1633 - RNA, 21 nt, artificial
  Oligomer
ugcccucaacuucucagugaa

SEQ ID NO: 1634 - RNA, 21 nt, artificial
  Oligomer
gaaccaggagauuguuggaua

SEQ ID NO: 1635 - RNA, 21 nt, artificial
  Oligomer
ggagcugaacuugcucaaucu

SEQ ID NO: 1636 - RNA, 21 nt, artificial
  Oligomer
ugaggagcugaacuugcucaa

SEQ ID NO: 1637 - RNA, 21 nt, artificial
  Oligomer
ccaaagagacccugaagaaua

SEQ ID NO: 1638 - RNA, 21 nt, artificial
  Oligomer
ccgucacauuacauguuuaau

SEQ ID NO: 1639 - RNA, 21 nt, artificial
  Oligomer
gcggaaucaaucagcuguguu

SEQ ID NO: 1640 - RNA, 21 nt, artificial
  Oligomer
uggacccaauucacuauccaa

SEQ ID NO: 1641 - RNA, 21 nt, artificial
  Oligomer
acguccucgguggaaacuuuu

SEQ ID NO: 1642 - RNA, 21 nt, artificial
  Oligomer
cuaugucaacauccagcugua

SEQ ID NO: 1643 - RNA, 21 nt, artificial
  Oligomer
gcagauuuacucuguauguug

SEQ ID NO: 1644 - RNA, 21 nt, artificial
  Oligomer
cuuccguugguuugcagauuu

SEQ ID NO: 1645 - RNA, 21 nt, artificial
  Oligomer
gcauuggaguaacuccauuug

SEQ ID NO: 1646 - RNA, 21 nt, artificial
  Oligomer
guccuuuuggaaguccauuug

SEQ ID NO: 1647 - RNA, 21 nt, artificial
  Oligomer
acugaaaccaaagcaacauuu

SEQ ID NO: 1648 - RNA, 21 nt, artificial
  Oligomer
ccucacaauguguccaacuga

SEQ ID NO: 1649 - RNA, 21 nt, artificial
  Oligomer
ccaguguaucugcauuagaaa

SEQ ID NO: 1650 - RNA, 21 nt, artificial
  Oligomer
cccaguguaucugcauuagaa

SEQ ID NO: 1651 - RNA, 21 nt, artificial
  Oligomer
gucauaagucaucccucagau

SEQ ID NO: 1652 - RNA, 21 nt, artificial
  Oligomer
ucaccaucauuucggucauaa

SEQ ID NO: 1653 - RNA, 21 nt, artificial
  Oligomer
agucaccaucauuucggucau

SEQ ID NO: 1654 - RNA, 21 nt, artificial
  Oligomer
ccagucaccaucauuucgguc

SEQ ID NO: 1655 - RNA, 21 nt, artificial
  Oligomer
uccaagcuaauuuuccacaga

SEQ ID NO: 1656 - RNA, 21 nt, artificial
  Oligomer
gcagaguuuacccagcacaaa

SEQ ID NO: 1657 - RNA, 21 nt, artificial
  Oligomer
accagaguauuucucagaaca

SEQ ID NO: 1658 - RNA, 21 nt, artificial
  Oligomer
gcugcugacguugcauguuuc

SEQ ID NO: 1659 - RNA, 21 nt, artificial
  Oligomer
cuucuuugucuucuacaugcu

SEQ ID NO: 1660 - RNA, 21 nt, artificial
  Oligomer
cagccucuacauaugcaauaa

SEQ ID NO: 1661 - RNA, 21 nt, artificial
  Oligomer
gugcuauuccucaugaucaca

SEQ ID NO: 1662 - RNA, 21 nt, artificial
  Oligomer
ggugguggugcuauuccucau

SEQ ID NO: 1663 - RNA, 21 nt, artificial
  Oligomer
ucaacuucucagugaauuaca

SEQ ID NO: 1664 - RNA, 21 nt, artificial
  Oligomer
gugaaugcccucaacuucuca

SEQ ID NO: 1665 - RNA, 21 nt, artificial
  Oligomer
gaggagcugaacuugcucaau

SEQ ID NO: 1666 - RNA, 21 nt, artificial
  Oligomer
cucaacacccuguuggaugac

SEQ ID NO: 1667 - RNA, 21 nt, artificial
  Oligomer
ucaauacucaacacccuguug

SEQ ID NO: 1668 - RNA, 21 nt, artificial
  Oligomer
ucuagucaagacuccgaaauu

SEQ ID NO: 1669 - RNA, 21 nt, artificial
  Oligomer
caucuagucaagacuccgaaa

SEQ ID NO: 1670 - RNA, 21 nt, artificial
  Oligomer
agaguaucacuaccuccacca

SEQ ID NO: 1671 - RNA, 21 nt, artificial
  Oligomer
aacugaaaccaaagcaacauu

SEQ ID NO: 1672 - RNA, 21 nt, artificial
  Oligomer
cggucauaagucaucccucag

SEQ ID NO: 1673 - RNA, 21 nt, artificial
  Oligomer
gcccagauuccaagcuaauuu

SEQ ID NO: 1674 - RNA, 21 nt, artificial
  Oligomer
gagcccagauuccaagcuaau

SEQ ID NO: 1675 - RNA, 21 nt, artificial
  Oligomer
cccugaaggauuuucaaaacc

SEQ ID NO: 1676 - RNA, 21 nt, artificial
  Oligomer
ugaaccuuucccugaaggauu

SEQ ID NO: 1677 - RNA, 21 nt, artificial
  Oligomer
cuggaaaaccuucuugcugua

SEQ ID NO: 1678 - RNA, 21 nt, artificial
  Oligomer
cuaauuuagauacccacccuc

SEQ ID NO: 1679 - RNA, 21 nt, artificial
  Oligomer
gggcugcugaaguaucaaacu

SEQ ID NO: 1680 - RNA, 21 nt, artificial
  Oligomer
ugguggugcuauuccucauga

SEQ ID NO: 1681 - RNA, 21 nt, artificial
  Oligomer
ggauccuagaaaacuucucuu

SEQ ID NO: 1682 - RNA, 21 nt, artificial
  Oligomer
gugccgaacacucuuggcuua

SEQ ID NO: 1683 - RNA, 21 nt, artificial
  Oligomer
gagcugaacuugcucaaucua

SEQ ID NO: 1684 - RNA, 21 nt, artificial
  Oligomer
gguggauucaagaacucccua

SEQ ID NO: 1685 - RNA, 21 nt, artificial
  Oligomer
gucuuucagcugaaaacuuuu

SEQ ID NO: 1686 - RNA, 21 nt, artificial
  Oligomer
ucauaaacugaguaaccagaa

SEQ ID NO: 1687 - RNA, 21 nt, artificial
  Oligomer
cagaccugacuaugucaacau

SEQ ID NO: 1688 - RNA, 21 nt, artificial
  Oligomer
gcaagagaacagaccugacua

SEQ ID NO: 1689 - RNA, 21 nt, artificial
  Oligomer
ugcagauuuacucuguauguu

SEQ ID NO: 1690 - RNA, 21 nt, artificial
  Oligomer
guuugcagauuuacucuguau

SEQ ID NO: 1691 - RNA, 21 nt, artificial
  Oligomer
ccuuccguugguuugcagauu

SEQ ID NO: 1692 - RNA, 21 nt, artificial
  Oligomer
agauauccaguccuuccguug

SEQ ID NO: 1693 - RNA, 21 nt, artificial
  Oligomer
ggaaucacugaacuaugaggu

SEQ ID NO: 1694 - RNA, 21 nt, artificial
  Oligomer
gaaguccauuugaggaaucac

SEQ ID NO: 1695 - RNA, 21 nt, artificial
  Oligomer
cgagauuuacuacugccucca

SEQ ID NO: 1696 - RNA, 21 nt, artificial
  Oligomer
gccagaguaucacuaccucca

SEQ ID NO: 1697 - RNA, 21 nt, artificial
  Oligomer
cugcauuagaaaaucauccau

SEQ ID NO: 1698 - RNA, 21 nt, artificial
  Oligomer
caagggccagaguaucacuac

SEQ ID NO: 1699 - RNA, 21 nt, artificial
  Oligomer
ucauaagucaucccucagaug

SEQ ID NO: 1700 - RNA, 21 nt, artificial
  Oligomer
cuguauaaccaagggccagag

SEQ ID NO: 1701 - RNA, 21 nt, artificial
  Oligomer
guacugugccgaaagacuuua

SEQ ID NO: 1702 - RNA, 21 nt, artificial
  Oligomer
cuguacugugccgaaagacuu

SEQ ID NO: 1703 - RNA, 21 nt, artificial
  Oligomer
ugugaagauuuguauggaaga

SEQ ID NO: 1704 - RNA, 21 nt, artificial
  Oligomer
cagcacaaauuugugaagauu

SEQ ID NO: 1705 - RNA, 21 nt, artificial
  Oligomer
ccagcacaaauuugugaagau

SEQ ID NO: 1706 - RNA, 21 nt, artificial
  Oligomer
agaguuuacccagcacaaauu

SEQ ID NO: 1707 - RNA, 21 nt, artificial
  Oligomer
aggauuuucaaaaccggcaga

SEQ ID NO: 1708 - RNA, 21 nt, artificial
  Oligomer
uuaccagaguauuucucagaa

SEQ ID NO: 1709 - RNA, 21 nt, artificial
  Oligomer
ucccggcugcaucagucuuaa

SEQ ID NO: 1710 - RNA, 21 nt, artificial
  Oligomer
agaaaacuucucuucacaacu

SEQ ID NO: 1711 - RNA, 21 nt, artificial
  Oligomer
aaccaggagauuguuggauaa

SEQ ID NO: 1712 - RNA, 21 nt, artificial
  Oligomer
caggagaaccaggagauuguu

SEQ ID NO: 1713 - RNA, 21 nt, artificial
  Oligomer
uggaaaccaaagagacccuga

SEQ ID NO: 1714 - RNA, 21 nt, artificial
  Oligomer
agcuguguuaugccaaagaau

SEQ ID NO: 1715 - RNA, 21 nt, artificial
  Oligomer
gacucuaaagaaggaaugagu

SEQ ID NO: 1716 - RNA, 21 nt, artificial
  Oligomer
gccaugaagcaggacucuaaa

SEQ ID NO: 1717 - RNA, 21 nt, artificial
  Oligomer
ggacccaauucacuauccaag

SEQ ID NO: 1718 - RNA, 21 nt, artificial
  Oligomer
guggacccaauucacuaucca

SEQ ID NO: 1719 - RNA, 21 nt, artificial
  Oligomer
gaggaaaaacaguugguguuu

SEQ ID NO: 1720 - RNA, 21 nt, artificial
  Oligomer
gacguccucgguggaaacuuu

SEQ ID NO: 1721 - RNA, 21 nt, artificial
  Oligomer
gcacugaauucaagacuguuu

SEQ ID NO: 1722 - RNA, 21 nt, artificial
  Oligomer
gagccucagcaucuguucuua

SEQ ID NO: 1723 - RNA, 21 nt, artificial
  Oligomer
cuguauguugcauaacaaguu

SEQ ID NO: 1724 - RNA, 21 nt, artificial
  Oligomer
gagauauccaguccuuccguu

SEQ ID NO: 1725 - RNA, 21 nt, artificial
  Oligomer
gucuaagcagagccucagcau

SEQ ID NO: 1726 - RNA, 21 nt, artificial
  Oligomer
ggaaguccauuugaggaauca

SEQ ID NO: 1727 - RNA, 21 nt, artificial
  Oligomer
agacuccgaaauucugcccuu

SEQ ID NO: 1728 - RNA, 21 nt, artificial
  Oligomer
guaucacuaccuccaccagau

SEQ ID NO: 1729 - RNA, 21 nt, artificial
  Oligomer
gagauuuacuacugccuccau

SEQ ID NO: 1730 - RNA, 21 nt, artificial
  Oligomer
caauguguccaacugaaacca

SEQ ID NO: 1731 - RNA, 21 nt, artificial
  Oligomer
agggccagaguaucacuaccu

SEQ ID NO: 1732 - RNA, 21 nt, artificial
  Oligomer
cucuacauugucccaguguau

SEQ ID NO: 1733 - RNA, 21 nt, artificial
  Oligomer
aagucaucccucagaugucau

SEQ ID NO: 1734 - RNA, 21 nt, artificial
  Oligomer
gagcaauaagccagucaccau

SEQ ID NO: 1735 - RNA, 21 nt, artificial
  Oligomer
cagguauauccggagcaauaa

SEQ ID NO: 1736 - RNA, 21 nt, artificial
  Oligomer
ugcugcugacguugcauguuu

SEQ ID NO: 1737 - RNA, 21 nt, artificial
  Oligomer
ggugcuauuccucaugaucac

SEQ ID NO: 1738 - RNA, 21 nt, artificial
  Oligomer
cugcauggugguggugcuauu

SEQ ID NO: 1739 - RNA, 21 nt, artificial
  Oligomer
accaggagauuguuggauaaa

SEQ ID NO: 1740 - RNA, 21 nt, artificial
  Oligomer
uugcucaaucuaaggcugauu

SEQ ID NO: 1741 - RNA, 21 nt, artificial
  Oligomer
cccuagugaggagcugaacuu

SEQ ID NO: 1742 - RNA, 21 nt, artificial
  Oligomer
gaccgucacauuacauguuua

SEQ ID NO: 1743 - RNA, 21 nt, artificial
  Oligomer
cagcuguguuaugccaaagaa

SEQ ID NO: 1744 - RNA, 21 nt, artificial
  Oligomer
gccucagcaucuguucuuaac

SEQ ID NO: 1745 - RNA, 21 nt, artificial
  Oligomer
acucuguauguugcauaacaa

SEQ ID NO: 1746 - RNA, 21 nt, artificial
  Oligomer
ggaugacuggaaaccauacaa

SEQ ID NO: 1747 - RNA, 21 nt, artificial
  Oligomer
aggcauuggaguaacuccauu

SEQ ID NO: 1748 - RNA, 21 nt, artificial
  Oligomer
uuggaaguccauuugaggaau

SEQ ID NO: 1749 - RNA, 21 nt, artificial
  Oligomer
gggcuaggauugugucuaagc

SEQ ID NO: 1750 - RNA, 21 nt, artificial
  Oligomer
cccaagcuguauauugauggu

SEQ ID NO: 1751 - RNA, 21 nt, artificial
  Oligomer
cucacaauguguccaacugaa

SEQ ID NO: 1752 - RNA, 21 nt, artificial
  Oligomer
ugucccaguguaucugcauua

SEQ ID NO: 1753 - RNA, 21 nt, artificial
  Oligomer
auccgaauggucaaagaaaau

SEQ ID NO: 1754 - RNA, 21 nt, artificial
  Oligomer
gugccgaaagacuuuacaggu

SEQ ID NO: 1755 - RNA, 21 nt, artificial
  Oligomer
uccuuaccagaguauuucuca

SEQ ID NO: 1756 - RNA, 21 nt, artificial
  Oligomer
agcucucagaauauuuccuua

SEQ ID NO: 1757 - RNA, 21 nt, artificial
  Oligomer
ccgaaccagcucucagaauau

SEQ ID NO: 1758 - RNA, 21 nt, artificial
  Oligomer
cugguauacucauaaccucuu

SEQ ID NO: 1759 - RNA, 21 nt, artificial
  Oligomer
agccucuacauaugcaauaag

SEQ ID NO: 1760 - RNA, 21 nt, artificial
  Oligomer
acagccucuacauaugcaaua

SEQ ID NO: 1761 - RNA, 21 nt, artificial
  Oligomer
ucacagccucuacauaugcaa

SEQ ID NO: 1762 - RNA, 21 nt, artificial
  Oligomer
ucagugaauuacagugaagac

SEQ ID NO: 1763 - RNA, 21 nt, artificial
  Oligomer
gcaggagaaccaggagauugu

SEQ ID NO: 1764 - RNA, 21 nt, artificial
  Oligomer
ccuguucaucuggcucuccau

SEQ ID NO: 1765 - RNA, 21 nt, artificial
  Oligomer
ggauucaagaacucccuagug

SEQ ID NO: 1766 - RNA, 21 nt, artificial
  Oligomer
accaaagagacccugaagaau

SEQ ID NO: 1767 - RNA, 21 nt, artificial
  Oligomer
ugaccgucacauuacauguuu

SEQ ID NO: 1768 - RNA, 21 nt, artificial
  Oligomer
caaucagcuguguuaugccaa

SEQ ID NO: 1769 - RNA, 21 nt, artificial
  Oligomer
ucagcugaaaacuuuugccau

SEQ ID NO: 1770 - RNA, 21 nt, artificial
  Oligomer
agagucuuucagcugaaaacu

SEQ ID NO: 1771 - RNA, 21 nt, artificial
  Oligomer
uaaacugaguaaccagaacaa

SEQ ID NO: 1772 - RNA, 21 nt, artificial
  Oligomer
gagaaaaauaucaugcacuga

SEQ ID NO: 1773 - RNA, 21 nt, artificial
  Oligomer
cagcuguaccucagucaaaca

SEQ ID NO: 1774 - RNA, 21 nt, artificial
  Oligomer
uuccguugguuugcagauuua

SEQ ID NO: 1775 - RNA, 21 nt, artificial
  Oligomer
agagauauccaguccuuccgu

SEQ ID NO: 1776 - RNA, 21 nt, artificial
  Oligomer
gcuaggauugugucuaagcag

SEQ ID NO: 1777 - RNA, 21 nt, artificial
  Oligomer
ggcuaggauugugucuaagca

SEQ ID NO: 1778 - RNA, 21 nt, artificial
  Oligomer
ccaagcuguauauugaugguc

SEQ ID NO: 1779 - RNA, 21 nt, artificial
  Oligomer
caaucuagaaauuaucccaag

SEQ ID NO: 1780 - RNA, 21 nt, artificial
  Oligomer
ucacuaccuccaccagauguu

SEQ ID NO: 1781 - RNA, 21 nt, artificial
  Oligomer
cuccgaaauucugcccuucau

SEQ ID NO: 1782 - RNA, 21 nt, artificial
  Oligomer
gaguaucacuaccuccaccag

SEQ ID NO: 1783 - RNA, 21 nt, artificial
  Oligomer
caacugaaaccaaagcaacau

SEQ ID NO: 1784 - RNA, 21 nt, artificial
  Oligomer
ccaacugaaaccaaagcaaca

SEQ ID NO: 1785 - RNA, 21 nt, artificial
  Oligomer
gucccaguguaucugcauuag

SEQ ID NO: 1786 - RNA, 21 nt, artificial
  Oligomer
ggagcaauaagccagucacca

SEQ ID NO: 1787 - RNA, 21 nt, artificial
  Oligomer
ggcuuuggauuucuggaccuu

SEQ ID NO: 1788 - RNA, 21 nt, artificial
  Oligomer
ccugaaggauuuucaaaaccg

SEQ ID NO: 1789 - RNA, 21 nt, artificial
  Oligomer
gcucucagaauauuuccuuac

SEQ ID NO: 1790 - RNA, 21 nt, artificial
  Oligomer
gucuuaaccgaaccagcucuc

SEQ ID NO: 1791 - RNA, 21 nt, artificial
  Oligomer
gcugcaucagucuuaaccgaa

SEQ ID NO: 1792 - RNA, 21 nt, artificial
  Oligomer
cugcugacguugcauguuuca

SEQ ID NO: 1793 - RNA, 21 nt, artificial
  Oligomer
ccgagaugaggauccuagaaa

SEQ ID NO: 1794 - RNA, 21 nt, artificial
  Oligomer
cucagugaauuacagugaaga

SEQ ID NO: 1795 - RNA, 21 nt, artificial
  Oligomer
ugccgaacacucuuggcuuac

SEQ ID NO: 1796 - RNA, 21 nt, artificial
  Oligomer
gaacuugcucaaucuaaggcu

SEQ ID NO: 1797 - RNA, 21 nt, artificial
  Oligomer
gcugaacuugcucaaucuaag

SEQ ID NO: 1798 - RNA, 21 nt, artificial
  Oligomer
agcugaacuugcucaaucuaa

SEQ ID NO: 1799 - RNA, 21 nt, artificial
  Oligomer
ugaugugaugauucacuuuuc

SEQ ID NO: 1800 - RNA, 21 nt, artificial
  Oligomer
uaaccucaacugcagccuuau

SEQ ID NO: 1801 - RNA, 21 nt, artificial
  Oligomer
uaaacaccucugccuguucau

SEQ ID NO: 1802 - RNA, 21 nt, artificial
  Oligomer
gaguaaccagaacaacucaua

SEQ ID NO: 1803 - RNA, 21 nt, artificial
  Oligomer
ugcacugaauucaagacuguu

SEQ ID NO: 1804 - RNA, 21 nt, artificial
  Oligomer
ccucagcaucuguucuuaacc

SEQ ID NO: 1805 - RNA, 21 nt, artificial
  Oligomer
agccucagcaucuguucuuaa

SEQ ID NO: 1806 - RNA, 21 nt, artificial
  Oligomer
ccagcuguaccucagucaaac

SEQ ID NO: 1807 - RNA, 21 nt, artificial
  Oligomer
uccguugguuugcagauuuac

SEQ ID NO: 1808 - RNA, 21 nt, artificial
  Oligomer
auccaguccuuccguugguuu

SEQ ID NO: 1809 - RNA, 21 nt, artificial
  Oligomer
acccuguuggaugacuggaaa

SEQ ID NO: 1810 - RNA, 21 nt, artificial
  Oligomer
caacacccuguuggaugacug

SEQ ID NO: 1811 - RNA, 21 nt, artificial
  Oligomer
auauugaugguccuuuuggaa

SEQ ID NO: 1812 - RNA, 21 nt, artificial
  Oligomer
cuagaaauuaucccaagcugu

SEQ ID NO: 1813 - RNA, 21 nt, artificial
  Oligomer
ccgaaauucugcccuucauuc

SEQ ID NO: 1814 - RNA, 21 nt, artificial
  Oligomer
cugaaaccaaagcaacauuug

SEQ ID NO: 1815 - RNA, 21 nt, artificial
  Oligomer
agaugucauggaaauccgaau

SEQ ID NO: 1816 - RNA, 21 nt, artificial
  Oligomer
uccggagcaauaagccaguca

SEQ ID NO: 1817 - RNA, 21 nt, artificial
  Oligomer
ccacagacuuggcuuuggauu

SEQ ID NO: 1818 - RNA, 21 nt, artificial
  Oligomer
agcccagauuccaagcuaauu

SEQ ID NO: 1819 - RNA, 21 nt, artificial
  Oligomer
gaacauuuucaugaaccuuuc

SEQ ID NO: 1820 - RNA, 21 nt, artificial
  Oligomer
ucucagaacauuuucaugaac

SEQ ID NO: 1821 - RNA, 21 nt, artificial
  Oligomer
uaaccgaaccagcucucagaa

SEQ ID NO: 1822 - RNA, 21 nt, artificial
  Oligomer
gccucuacauaugcaauaaga

SEQ ID NO: 1823 - RNA, 21 nt, artificial
  Oligomer
ucucagugaauuacagugaag

SEQ ID NO: 1824 - RNA, 21 nt, artificial
  Oligomer
uucucagugaauuacagugaa

SEQ ID NO: 1825 - RNA, 21 nt, artificial
  Oligomer
uccauauuaccugugguguua

SEQ ID NO: 1826 - RNA, 21 nt, artificial
  Oligomer
agaagguuccaagcaggagaa

SEQ ID NO: 1827 - RNA, 21 nt, artificial
  Oligomer
ugguggauucaagaacucccu

SEQ ID NO: 1828 - RNA, 21 nt, artificial
  Oligomer
cauguuuaaucuggaaaccaa

SEQ ID NO: 1829 - RNA, 21 nt, artificial
  Oligomer
ccaagacucuucauaaacuga

SEQ ID NO: 1830 - RNA, 21 nt, artificial
  Oligomer
uccucgguggaaacuuuuguu

SEQ ID NO: 1831 - RNA, 21 nt, artificial
  Oligomer
ucagcaucuguucuuaaccuc

SEQ ID NO: 1832 - RNA, 21 nt, artificial
  Oligomer
cucuguauguugcauaacaag

SEQ ID NO: 1833 - RNA, 21 nt, artificial
  Oligomer
ccguugguuugcagauuuacu

SEQ ID NO: 1834 - RNA, 21 nt, artificial
  Oligomer
cccuguuggaugacuggaaac

SEQ ID NO: 1835 - RNA, 21 nt, artificial
  Oligomer
gguuaaacaccucugccuguu

SEQ ID NO: 1836 - RNA, 21 nt, artificial
  Oligomer
ggaguaacuccauuugcauca

SEQ ID NO: 1837 - RNA, 21 nt, artificial
  Oligomer
gaggcauuggaguaacuccau

SEQ ID NO: 1838 - RNA, 21 nt, artificial
  Oligomer
gaaucacugaacuaugagguc

SEQ ID NO: 1839 - RNA, 21 nt, artificial
  Oligomer
agaaauuaucccaagcuguau

SEQ ID NO: 1840 - RNA, 21 nt, artificial
  Oligomer
gacuccgaaauucugcccuuc

SEQ ID NO: 1841 - RNA, 21 nt, artificial
  Oligomer
ucccaguguaucugcauuaga

SEQ ID NO: 1842 - RNA, 21 nt, artificial
  Oligomer
uggucaguauauuacucuaca

SEQ ID NO: 1843 - RNA, 21 nt, artificial
  Oligomer
cuggucaguauauuacucuac

SEQ ID NO: 1844 - RNA, 21 nt, artificial
  Oligomer
uccacagacuuggcuuuggau

SEQ ID NO: 1845 - RNA, 21 nt, artificial
  Oligomer
ccuuucccugaaggauuuuca

SEQ ID NO: 1846 - RNA, 21 nt, artificial
  Oligomer
acuaauuuagauacccacccu

SEQ ID NO: 1847 - RNA, 21 nt, artificial
  Oligomer
agggcugcugaaguaucaaac

SEQ ID NO: 1848 - RNA, 21 nt, artificial
  Oligomer
cacagccucuacauaugcaau

SEQ ID NO: 1849 - RNA, 21 nt, artificial
  Oligomer
ugaggauccuagaaaacuucu

SEQ ID NO: 1850 - RNA, 21 nt, artificial
  Oligomer
gcagcaagauaccgagaugag

SEQ ID NO: 1851 - RNA, 21 nt, artificial
  Oligomer
ugaacugaaugcagcaagaua

SEQ ID NO: 1852 - RNA, 21 nt, artificial
  Oligomer
acauuccauauuaccuguggu

SEQ ID NO: 1853 - RNA, 21 nt, artificial
  Oligomer
acacuguugauuuucauggug

SEQ ID NO: 1854 - RNA, 21 nt, artificial
  Oligomer
ucagcuguguuaugccaaaga

SEQ ID NO: 1855 - RNA, 21 nt, artificial
  Oligomer
acaguugguguuuucuguugu

SEQ ID NO: 1856 - RNA, 21 nt, artificial
  Oligomer
aaacaguugguguuuucuguu

SEQ ID NO: 1857 - RNA, 21 nt, artificial
  Oligomer
agacuguuuauaggacguccu

SEQ ID NO: 1858 - RNA, 21 nt, artificial
  Oligomer
caagagaacagaccugacuau

SEQ ID NO: 1859 - RNA, 21 nt, artificial
  Oligomer
guuggaugacuggaaaccaua

SEQ ID NO: 1860 - RNA, 21 nt, artificial
  Oligomer
uuggaguaacuccauuugcau

SEQ ID NO: 1861 - RNA, 21 nt, artificial
  Oligomer
uggaaguccauuugaggaauc

SEQ ID NO: 1862 - RNA, 21 nt, artificial
  Oligomer
augguccuuuuggaaguccau

SEQ ID NO: 1863 - RNA, 21 nt, artificial
  Oligomer
ggguuaaacaccucugccugu

SEQ ID NO: 1864 - RNA, 21 nt, artificial
  Oligomer
uccaacugaaaccaaagcaac

SEQ ID NO: 1865 - RNA, 21 nt, artificial
  Oligomer
cuacauugucccaguguaucu

SEQ ID NO: 1866 - RNA, 21 nt, artificial
  Oligomer
caccaucauuucggucauaag

SEQ ID NO: 1867 - RNA, 21 nt, artificial
  Oligomer
uacagguauauccggagcaau

SEQ ID NO: 1868 - RNA, 21 nt, artificial
  Oligomer
ugccgaaagacuuuacaggua

SEQ ID NO: 1869 - RNA, 21 nt, artificial
  Oligomer
gcacaaauuugugaagauuug

SEQ ID NO: 1870 - RNA, 21 nt, artificial
  Oligomer
uggaaaaccuucuugcuguau

SEQ ID NO: 1871 - RNA, 21 nt, artificial
  Oligomer
aaccuuucccugaaggauuuu

SEQ ID NO: 1872 - RNA, 21 nt, artificial
  Oligomer
cugacguugcauguuucagga

SEQ ID NO: 1873 - RNA, 21 nt, artificial
  Oligomer
ugguauacucauaaccucuuc

SEQ ID NO: 1874 - RNA, 21 nt, artificial
  Oligomer
aggauccuagaaaacuucucu

SEQ ID NO: 1875 - RNA, 21 nt, artificial
  Oligomer
ugcagcaagauaccgagauga

SEQ ID NO: 1876 - RNA, 21 nt, artificial
  Oligomer
uugaacugaaugcagcaagau

SEQ ID NO: 1877 - RNA, 21 nt, artificial
  Oligomer
uucaucuggcucuccaugaau

SEQ ID NO: 1878 - RNA, 21 nt, artificial
  Oligomer
gcucaaucuaaggcugauugu

SEQ ID NO: 1879 - RNA, 21 nt, artificial
  Oligomer
uggauucaagaacucccuagu

SEQ ID NO: 1880 - RNA, 21 nt, artificial
  Oligomer
aacuguuagaugcacacuguu

SEQ ID NO: 1881 - RNA, 21 nt, artificial
  Oligomer
gaugauucacuuuucaguucu

SEQ ID NO: 1882 - RNA, 21 nt, artificial
  Oligomer
gaugugaugauucacuuuuca

SEQ ID NO: 1883 - RNA, 21 nt, artificial
  Oligomer
uggcaagaugaccgucacauu

SEQ ID NO: 1884 - RNA, 21 nt, artificial
  Oligomer
agaauguggcaagaugaccgu

SEQ ID NO: 1885 - RNA, 21 nt, artificial
  Oligomer
agcggaaucaaucagcugugu

SEQ ID NO: 1886 - RNA, 21 nt, artificial
  Oligomer
aaagagucuuucagcugaaaa

SEQ ID NO: 1887 - RNA, 21 nt, artificial
  Oligomer
uaaagagucuuucagcugaaa

SEQ ID NO: 1888 - RNA, 21 nt, artificial
  Oligomer
agacucuucauaaacugagua

SEQ ID NO: 1889 - RNA, 21 nt, artificial
  Oligomer
ggaaaaacaguugguguuuuc

SEQ ID NO: 1890 - RNA, 21 nt, artificial
  Oligomer
gacuguuuauaggacguccuc

SEQ ID NO: 1891 - RNA, 21 nt, artificial
  Oligomer
ccugacuaugucaacauccag

SEQ ID NO: 1892 - RNA, 21 nt, artificial
  Oligomer
agaacagaccugacuauguca

SEQ ID NO: 1893 - RNA, 21 nt, artificial
  Oligomer
uugcauaacaaguuuuggcaa

SEQ ID NO: 1894 - RNA, 21 nt, artificial
  Oligomer
ugguuugcagauuuacucugu

SEQ ID NO: 1895 - RNA, 21 nt, artificial
  Oligomer
guccuuccguugguuugcaga

SEQ ID NO: 1896 - RNA, 21 nt, artificial
  Oligomer
gaggaaucacugaacuaugag

SEQ ID NO: 1897 - RNA, 21 nt, artificial
  Oligomer
agaccuggucaguauauuacu

SEQ ID NO: 1898 - RNA, 21 nt, artificial
  Oligomer
acagguauauccggagcaaua

SEQ ID NO: 1899 - RNA, 21 nt, artificial
  Oligomer
uggaccuuugugccuguacug

SEQ ID NO: 1900 - RNA, 21 nt, artificial
  Oligomer
cuuucccugaaggauuuucaa

SEQ ID NO: 1901 - RNA, 21 nt, artificial
  Oligomer
cagcucucagaauauuuccuu

SEQ ID NO: 1902 - RNA, 21 nt, artificial
  Oligomer
cgaaccagcucucagaauauu

SEQ ID NO: 1903 - RNA, 21 nt, artificial
  Oligomer
gguauacucauaaccucuucu

SEQ ID NO: 1904 - RNA, 21 nt, artificial
  Oligomer
ccucuacauaugcaauaagag

SEQ ID NO: 1905 - RNA, 21 nt, artificial
  Oligomer
accgagaugaggauccuagaa

SEQ ID NO: 1906 - RNA, 21 nt, artificial
  Oligomer
agauaccgagaugaggauccu

SEQ ID NO: 1907 - RNA, 21 nt, artificial
  Oligomer
gaagguuccaagcaggagaac

SEQ ID NO: 1908 - RNA, 21 nt, artificial
  Oligomer
gaaaacuguuagaugcacacu

SEQ ID NO: 1909 - RNA, 21 nt, artificial
  Oligomer
gugaugauucacuuuucaguu

SEQ ID NO: 1910 - RNA, 21 nt, artificial
  Oligomer
cgucacauuacauguuuaauc

SEQ ID NO: 1911 - RNA, 21 nt, artificial
  Oligomer
ggcaagaugaccgucacauua

SEQ ID NO: 1912 - RNA, 21 nt, artificial
  Oligomer
cagcggaaucaaucagcugug

SEQ ID NO: 1913 - RNA, 21 nt, artificial
  Oligomer
ugaguaaccagaacaacucau

SEQ ID NO: 1914 - RNA, 21 nt, artificial
  Oligomer
cugaguaaccagaacaacuca

SEQ ID NO: 1915 - RNA, 21 nt, artificial
  Oligomer
gcuguaccucagucaaacaga

SEQ ID NO: 1916 - RNA, 21 nt, artificial
  Oligomer
agaccugacuaugucaacauc

SEQ ID NO: 1917 - RNA, 21 nt, artificial
  Oligomer
gaacagaccugacuaugucaa

SEQ ID NO: 1918 - RNA, 21 nt, artificial
  Oligomer
ggcaagagaacagaccugacu

SEQ ID NO: 1919 - RNA, 21 nt, artificial
  Oligomer
cacccuguuggaugacuggaa

SEQ ID NO: 1920 - RNA, 21 nt, artificial
  Oligomer
ucgggcuuccacucagucuuu

SEQ ID NO: 1921 - RNA, 21 nt, artificial
  Oligomer
cugaacuaugaggucagccuc

SEQ ID NO: 1922 - RNA, 21 nt, artificial
  Oligomer
uccauuugaggaaucacugaa

SEQ ID NO: 1923 - RNA, 21 nt, artificial
  Oligomer
ggaccuuugugccuguacugu

SEQ ID NO: 1924 - RNA, 21 nt, artificial
  Oligomer
ggauuucuggaccuuugugcc

SEQ ID NO: 1925 - RNA, 21 nt, artificial
  Oligomer
cccagcacaaauuugugaaga

SEQ ID NO: 1926 - RNA, 21 nt, artificial
  Oligomer
ggcugcaucagucuuaaccga

SEQ ID NO: 1927 - RNA, 21 nt, artificial
  Oligomer
ugcauggugguggugcuauuc

SEQ ID NO: 1928 - RNA, 21 nt, artificial
  Oligomer
caagauaccgagaugaggauc

SEQ ID NO: 1929 - RNA, 21 nt, artificial
  Oligomer
gagaaccaggagauuguugga

SEQ ID NO: 1930 - RNA, 21 nt, artificial
  Oligomer
ugcucaaucuaaggcugauug

SEQ ID NO: 1931 - RNA, 21 nt, artificial
  Oligomer
aaacuguuagaugcacacugu

SEQ ID NO: 1932 - RNA, 21 nt, artificial
  Oligomer
gcaagaugaccgucacauuac

SEQ ID NO: 1933 - RNA, 21 nt, artificial
  Oligomer
acuuugaaacucagcggaauc

SEQ ID NO: 1934 - RNA, 21 nt, artificial
  Oligomer
ugccaugaagcaggacucuaa

SEQ ID NO: 1935 - RNA, 21 nt, artificial
  Oligomer
agcugaaaacuuuugccauga

SEQ ID NO: 1936 - RNA, 21 nt, artificial
  Oligomer
gacucuucauaaacugaguaa

SEQ ID NO: 1937 - RNA, 21 nt, artificial
  Oligomer
ccucagucaaacagaugggau

SEQ ID NO: 1938 - RNA, 21 nt, artificial
  Oligomer
ugacuaugucaacauccagcu

SEQ ID NO: 1939 - RNA, 21 nt, artificial
  Oligomer
uggcaagagaacagaccugac

SEQ ID NO: 1940 - RNA, 21 nt, artificial
  Oligomer
ggaggcauuggaguaacucca

SEQ ID NO: 1941 - RNA, 21 nt, artificial
  Oligomer
ugaggaaucacugaacuauga

SEQ ID NO: 1942 - RNA, 21 nt, artificial
  Oligomer
uccgaauggucaaagaaaauu

SEQ ID NO: 1943 - RNA, 21 nt, artificial
  Oligomer
ucccucagaugucauggaaau

SEQ ID NO: 1944 - RNA, 21 nt, artificial
  Oligomer
caucccucagaugucauggaa

SEQ ID NO: 1945 - RNA, 21 nt, artificial
  Oligomer
gccagucaccaucauuucggu

SEQ ID NO: 1946 - RNA, 21 nt, artificial
  Oligomer
ucccugaaggauuuucaaaac

SEQ ID NO: 1947 - RNA, 21 nt, artificial
  Oligomer
cagaacauuuucaugaaccuu

SEQ ID NO: 1948 - RNA, 21 nt, artificial
  Oligomer
ucagaacauuuucaugaaccu

SEQ ID NO: 1949 - RNA, 21 nt, artificial
  Oligomer
accgaaccagcucucagaaua

SEQ ID NO: 1950 - RNA, 21 nt, artificial
  Oligomer
ggagggcugcugaaguaucaa

SEQ ID NO: 1951 - RNA, 21 nt, artificial
  Oligomer
uggcucuccaugaauguccug

SEQ ID NO: 1952 - RNA, 21 nt, artificial
  Oligomer
cuggcucuccaugaauguccu

SEQ ID NO: 1953 - RNA, 21 nt, artificial
  Oligomer
gauucacuuuucaguucucaa

SEQ ID NO: 1954 - RNA, 21 nt, artificial
  Oligomer
ugauucacuuuucaguucuca

SEQ ID NO: 1955 - RNA, 21 nt, artificial
  Oligomer
gagucuuucagcugaaaacuu

SEQ ID NO: 1956 - RNA, 21 nt, artificial
  Oligomer
caagacuguuuauaggacguc

SEQ ID NO: 1957 - RNA, 21 nt, artificial
  Oligomer
cuguaccucagucaaacagau

SEQ ID NO: 1958 - RNA, 21 nt, artificial
  Oligomer
gacuaugucaacauccagcug

SEQ ID NO: 1959 - RNA, 21 nt, artificial
  Oligomer
agagccucagcaucuguucuu

SEQ ID NO: 1960 - RNA, 21 nt, artificial
  Oligomer
ucagaugucauggaaauccga

SEQ ID NO: 1961 - RNA, 21 nt, artificial
  Oligomer
uuacagguauauccggagcaa

SEQ ID NO: 1962 - RNA, 21 nt, artificial
  Oligomer
ucagaauauuuccuuaccaga

SEQ ID NO: 1963 - RNA, 21 nt, artificial
  Oligomer
agucuuucagcugaaaacuuu

SEQ ID NO: 1964 - RNA, 21 nt, artificial
  Oligomer
uccagcuguaccucagucaaa

SEQ ID NO: 1965 - RNA, 21 nt, artificial
  Oligomer
cgaaauucugcccuucauuca

SEQ ID NO: 1966 - RNA, 21 nt, artificial
  Oligomer
aucccucagaugucauggaaa

SEQ ID NO: 1967 - RNA, 21 nt, artificial
  Oligomer
acccagcacaaauuugugaag

SEQ ID NO: 1968 - RNA, 21 nt, artificial
  Oligomer
cucagaauauuuccuuaccag

SEQ ID NO: 1969 - RNA, 21 nt, artificial
  Oligomer
auguccugcuuuucuggaaaa

SEQ ID NO: 1970 - RNA, 21 nt, artificial
  Oligomer
agaaaacuguuagaugcacac

SEQ ID NO: 1971 - RNA, 21 nt, artificial
  Oligomer
cuucauaaacugaguaaccag

SEQ ID NO: 1972 - RNA, 21 nt, artificial
  Oligomer
cuguuggaugacuggaaacca

SEQ ID NO: 1973 - RNA, 21 nt, artificial
  Oligomer
ucaggagggcugcugaaguau

SEQ ID NO: 1974 - RNA, 21 nt, artificial
  Oligomer
cacagaagguuccaagcagga

SEQ ID NO: 1975 - RNA, 21 nt, artificial
  Oligomer
uggaaauccgaauggucaaag

SEQ ID NO: 1976 - RNA, 21 nt, artificial
  Oligomer
agaauauuuccuuaccagagu

SEQ ID NO: 1977 - RNA, 21 nt, artificial
  Oligomer
ucucagaauauuuccuuacca

SEQ ID NO: 1978 - RNA, 21 nt, artificial
  Oligomer
gaaaaacaguugguguuuucu

SEQ ID NO: 1979 - RNA, 21 nt, artificial
  Oligomer
ggcuuccacucagucuuugac

SEQ ID NO: 1980 - RNA, 21 nt, artificial
  Oligomer
ugaaaacuuuugccaugaagc

SEQ ID NO: 1981 - RNA, 21 nt, artificial
  Oligomer
aggaaaaacaguugguguuuu

SEQ ID NO: 1982 - RNA, 21 nt, artificial
  Oligomer
ucaugcacugaauucaagacu

SEQ ID NO: 1983 - RNA, 21 nt, artificial
  Oligomer
uggcuuuggauuucuggaccu

SEQ ID NO: 1984 - RNA, 21 nt, artificial
  Oligomer
gaauguccugcuuuucuggaa

SEQ ID NO: 1985 - RNA, 21 nt, artificial
  Oligomer
cgaggaucacagaagguucca

SEQ ID NO: 1986 - RNA, 21 nt, artificial
  Oligomer
aagcuaauuuuccacagacuu

SEQ ID NO: 1987 - RNA, 21 nt, artificial
  Oligomer
uccgaggaucacagaagguuc

SEQ ID NO: 1988 - RNA, 21 nt, artificial
  Oligomer
ggaucacagaagguuccaagc

SEQ ID NO: 1989 - RNA, 21 nt, artificial
  Oligomer
aggaucacagaagguuccaag

SEQ ID NO: 1990 - RNA, 21 nt, artificial
  Oligomer
auugugaggguaaauggauga

SEQ ID NO: 1991 - RNA, 21 nt, artificial
  Oligomer
auuguauucaaaucuuguccc

SEQ ID NO: 1992 - RNA, 21 nt, artificial
  Oligomer
acauggguaaaaggauaaggc

SEQ ID NO: 1993 - RNA, 21 nt, artificial
  Oligomer
aaaaccuuacuauucuuuggc

SEQ ID NO: 1994 - RNA, 21 nt, artificial
  Oligomer
auaacacagcugauugauucc

SEQ ID NO: 1995 - RNA, 21 nt, artificial
  Oligomer
aucaaacaaaaguuuccaccg

SEQ ID NO: 1996 - RNA, 21 nt, artificial
  Oligomer
uucuagauugaaugaagggca

SEQ ID NO: 1997 - RNA, 21 nt, artificial
  Oligomer
aaucucgaaaucguucugucc

SEQ ID NO: 1998 - RNA, 21 nt, artificial
  Oligomer
uugugaggguaaauggaugau

SEQ ID NO: 1999 - RNA, 21 nt, artificial
  Oligomer
auaccuguaaagucuuucggc

SEQ ID NO: 2000 - RNA, 21 nt, artificial
  Oligomer
cucugccgguuuugaaaaucc

SEQ ID NO: 2001 - RNA, 21 nt, artificial
  Oligomer
auuccuucuuuagaguccugc

SEQ ID NO: 2002 - RNA, 21 nt, artificial
  Oligomer
agucuuggauagugaauuggg

SEQ ID NO: 2003 - RNA, 21 nt, artificial
  Oligomer
guugagguuaagaacagaugc

SEQ ID NO: 2004 - RNA, 21 nt, artificial
  Oligomer
uaaaucucgaaaucguucugu

SEQ ID NO: 2005 - RNA, 21 nt, artificial
  Oligomer
uauaccuguaaagucuuucgg

SEQ ID NO: 2006 - RNA, 21 nt, artificial
  Oligomer
uuuucuaggauccucaucucg

SEQ ID NO: 2007 - RNA, 21 nt, artificial
  Oligomer
aucuugucccauaugaguugu

SEQ ID NO: 2008 - RNA, 21 nt, artificial
  Oligomer
ucuugccaaaacuuguuaugc

SEQ ID NO: 2009 - RNA, 21 nt, artificial
  Oligomer
uauugaugcaaauggaguuac

SEQ ID NO: 2010 - RNA, 21 nt, artificial
  Oligomer
uagugauacucuggcccuugg

SEQ ID NO: 2011 - RNA, 21 nt, artificial
  Oligomer
augacuuaugaccgaaaugau

SEQ ID NO: 2012 - RNA, 21 nt, artificial
  Oligomer
auauaccuguaaagucuuucg

SEQ ID NO: 2013 - RNA, 21 nt, artificial
  Oligomer
auguagaggcugugaucauga

SEQ ID NO: 2014 - RNA, 21 nt, artificial
  Oligomer
aaauacagauaguaacaccac

SEQ ID NO: 2015 - RNA, 21 nt, artificial
  Oligomer
cacauggguaaaaggauaagg

SEQ ID NO: 2016 - RNA, 21 nt, artificial
  Oligomer
aaaccuuacuauucuuuggca

SEQ ID NO: 2017 - RNA, 21 nt, artificial
  Oligomer
uacuauucuuuggcauaacac

SEQ ID NO: 2018 - RNA, 21 nt, artificial
  Oligomer
uuguauucaaaucuuguccca

SEQ ID NO: 2019 - RNA, 21 nt, artificial
  Oligomer
gagucuuggauagugaauugg

SEQ ID NO: 2020 - RNA, 21 nt, artificial
  Oligomer
cagugcaugauauuuuucucc

SEQ ID NO: 2021 - RNA, 21 nt, artificial
  Oligomer
aacaggguguugaguauugau

SEQ ID NO: 2022 - RNA, 21 nt, artificial
  Oligomer
aaauuugugcuggguaaacuc

SEQ ID NO: 2023 - RNA, 21 nt, artificial
  Oligomer
ucaggccaggaacaguuguga

SEQ ID NO: 2024 - RNA, 21 nt, artificial
  Oligomer
gaaaauacagauaguaacacc

SEQ ID NO: 2025 - RNA, 21 nt, artificial
  Oligomer
uuuuauccaacaaucuccugg

SEQ ID NO: 2026 - RNA, 21 nt, artificial
  Oligomer
aaucuugcauuuguucaacca

SEQ ID NO: 2027 - RNA, 21 nt, artificial
  Oligomer
aauugcacucauuccuucuuu

SEQ ID NO: 2028 - RNA, 21 nt, artificial
  Oligomer
uugcacucauuccuucuuuag

SEQ ID NO: 2029 - RNA, 21 nt, artificial
  Oligomer
ucuuggauagugaauuggguc

SEQ ID NO: 2030 - RNA, 21 nt, artificial
  Oligomer
aaaaggaccaucaauauacag

SEQ ID NO: 2031 - RNA, 21 nt, artificial
  Oligomer
ucuagauugaaugaagggcag

SEQ ID NO: 2032 - RNA, 21 nt, artificial
  Oligomer
uugacuagauggaggcaguag

SEQ ID NO: 2033 - RNA, 21 nt, artificial
  Oligomer
aaaucguucuguccagucucc

SEQ ID NO: 2034 - RNA, 21 nt, artificial
  Oligomer
cuacuauuuuaagaugaaccc

SEQ ID NO: 2035 - RNA, 21 nt, artificial
  Oligomer
aaauuuucuuugaccauucgg

SEQ ID NO: 2036 - RNA, 21 nt, artificial
  Oligomer
gaaaauuagcuuggaaucugg

SEQ ID NO: 2037 - RNA, 21 nt, artificial
  Oligomer
uuauacagcaagaagguuuuc

SEQ ID NO: 2038 - RNA, 21 nt, artificial
  Oligomer
aacaguugugaagagaaguuu

SEQ ID NO: 2039 - RNA, 21 nt, artificial
  Oligomer
cauggguaaaaggauaaggcu

SEQ ID NO: 2040 - RNA, 21 nt, artificial
  Oligomer
uaacacagcugauugauuccg

SEQ ID NO: 2041 - RNA, 21 nt, artificial
  Oligomer
aagucuuagaaauugcacuca

SEQ ID NO: 2042 - RNA, 21 nt, artificial
  Oligomer
cucauuccuucuuuagagucc

SEQ ID NO: 2043 - RNA, 21 nt, artificial
  Oligomer
gucccauaugaguuguucugg

SEQ ID NO: 2044 - RNA, 21 nt, artificial
  Oligomer
ucaucaaacaaaaguuuccac

SEQ ID NO: 2045 - RNA, 21 nt, artificial
  Oligomer
caguaguaaaucucgaaaucg

SEQ ID NO: 2046 - RNA, 21 nt, artificial
  Oligomer
guggguaucuaaauuaguuug

SEQ ID NO: 2047 - RNA, 21 nt, artificial
  Oligomer
guagaggcugugaucaugagg

SEQ ID NO: 2048 - RNA, 21 nt, artificial
  Oligomer
auucaguucaacaaagucuuc

SEQ ID NO: 2049 - RNA, 21 nt, artificial
  Oligomer
caugcacgccugagaaaauac

SEQ ID NO: 2050 - RNA, 21 nt, artificial
  Oligomer
ugcacgccugagaaaauacag

SEQ ID NO: 2051 - RNA, 21 nt, artificial
  Oligomer
aacaauuuaaagaggaacacg

SEQ ID NO: 2052 - RNA, 21 nt, artificial
  Oligomer
auauucuucagggucucuuug

SEQ ID NO: 2053 - RNA, 21 nt, artificial
  Oligomer
gaaauugcacucauuccuucu

SEQ ID NO: 2054 - RNA, 21 nt, artificial
  Oligomer
ucauuccuucuuuagaguccu

SEQ ID NO: 2055 - RNA, 21 nt, artificial
  Oligomer
uugucccauaugaguuguucu

SEQ ID NO: 2056 - RNA, 21 nt, artificial
  Oligomer
caucaaacaaaaguuuccacc

SEQ ID NO: 2057 - RNA, 21 nt, artificial
  Oligomer
uaaacagucuugaauucagug

SEQ ID NO: 2058 - RNA, 21 nt, artificial
  Oligomer
uucucuugccaaaacuuguua

SEQ ID NO: 2059 - RNA, 21 nt, artificial
  Oligomer
uugaugcaaauggaguuacuc

SEQ ID NO: 2060 - RNA, 21 nt, artificial
  Oligomer
aaggaccaucaauauacagcu

SEQ ID NO: 2061 - RNA, 21 nt, artificial
  Oligomer
aaaucucgaaaucguucuguc

SEQ ID NO: 2062 - RNA, 21 nt, artificial
  Oligomer
guauaccagaagauaucauag

SEQ ID NO: 2063 - RNA, 21 nt, artificial
  Oligomer
aaagucuucacuguaauucac

SEQ ID NO: 2064 - RNA, 21 nt, artificial
  Oligomer
aagucuucacuguaauucacu

SEQ ID NO: 2065 - RNA, 21 nt, artificial
  Oligomer
uacagauaguaacaccacagg

SEQ ID NO: 2066 - RNA, 21 nt, artificial
  Oligomer
cuuuuauccaacaaucuccug

SEQ ID NO: 2067 - RNA, 21 nt, artificial
  Oligomer
caaucuugcauuuguucaacc

SEQ ID NO: 2068 - RNA, 21 nt, artificial
  Oligomer
guucggcacauggguaaaagg

SEQ ID NO: 2069 - RNA, 21 nt, artificial
  Oligomer
aauauucuucagggucucuuu

SEQ ID NO: 2070 - RNA, 21 nt, artificial
  Oligomer
ugguuuccagauuaaacaugu

SEQ ID NO: 2071 - RNA, 21 nt, artificial
  Oligomer
gaaaaccuuacuauucuuugg

SEQ ID NO: 2072 - RNA, 21 nt, artificial
  Oligomer
aaccuuacuauucuuuggcau

SEQ ID NO: 2073 - RNA, 21 nt, artificial
  Oligomer
aaagucuuagaaauugcacuc

SEQ ID NO: 2074 - RNA, 21 nt, artificial
  Oligomer
cauuccuucuuuagaguccug

SEQ ID NO: 2075 - RNA, 21 nt, artificial
  Oligomer
uuccuucuuuagaguccugcu

SEQ ID NO: 2076 - RNA, 21 nt, artificial
  Oligomer
cagcugaaagacucuuuauug

SEQ ID NO: 2077 - RNA, 21 nt, artificial
  Oligomer
aaucuugucccauaugaguug

SEQ ID NO: 2078 - RNA, 21 nt, artificial
  Oligomer
augaagagucuuggauaguga

SEQ ID NO: 2079 - RNA, 21 nt, artificial
  Oligomer
agagucuuggauagugaauug

SEQ ID NO: 2080 - RNA, 21 nt, artificial
  Oligomer
aaacaaaaguuuccaccgagg

SEQ ID NO: 2081 - RNA, 21 nt, artificial
  Oligomer
ugcaacauacagaguaaaucu

SEQ ID NO: 2082 - RNA, 21 nt, artificial
  Oligomer
auugaugcaaauggaguuacu

SEQ ID NO: 2083 - RNA, 21 nt, artificial
  Oligomer
guucagugauuccucaaaugg

SEQ ID NO: 2084 - RNA, 21 nt, artificial
  Oligomer
uaguaaaucucgaaaucguuc

SEQ ID NO: 2085 - RNA, 21 nt, artificial
  Oligomer
aaucguucuguccagucuccu

SEQ ID NO: 2086 - RNA, 21 nt, artificial
  Oligomer
uugcuuugguuucaguuggac

SEQ ID NO: 2087 - RNA, 21 nt, artificial
  Oligomer
uagaguaauauacugaccagg

SEQ ID NO: 2088 - RNA, 21 nt, artificial
  Oligomer
uugguuauacagcaagaaggu

SEQ ID NO: 2089 - RNA, 21 nt, artificial
  Oligomer
uauacagcaagaagguuuucc

SEQ ID NO: 2090 - RNA, 21 nt, artificial
  Oligomer
acaguugugaagagaaguuuu

SEQ ID NO: 2091 - RNA, 21 nt, artificial
  Oligomer
caaagucuucacuguaauuca

SEQ ID NO: 2092 - RNA, 21 nt, artificial
  Oligomer
acugagaaguugagggcauuc

SEQ ID NO: 2093 - RNA, 21 nt, artificial
  Oligomer
auacagauaguaacaccacag

SEQ ID NO: 2094 - RNA, 21 nt, artificial
  Oligomer
aucuugcauuuguucaaccaa

SEQ ID NO: 2095 - RNA, 21 nt, artificial
  Oligomer
auccaccaugaaaaucaacag

SEQ ID NO: 2096 - RNA, 21 nt, artificial
  Oligomer
auggguaaaaggauaaggcug

SEQ ID NO: 2097 - RNA, 21 nt, artificial
  Oligomer
uauucuuuggcauaacacagc

SEQ ID NO: 2098 - RNA, 21 nt, artificial
  Oligomer
uagaaauugcacucauuccuu

SEQ ID NO: 2099 - RNA, 21 nt, artificial
  Oligomer
auugcacucauuccuucuuua

SEQ ID NO: 2100 - RNA, 21 nt, artificial
  Oligomer
uucauggcaaaaguuuucagc

SEQ ID NO: 2101 - RNA, 21 nt, artificial
  Oligomer
cuugucccauaugaguuguuc

SEQ ID NO: 2102 - RNA, 21 nt, artificial
  Oligomer
ucucuugccaaaacuuguuau

SEQ ID NO: 2103 - RNA, 21 nt, artificial
  Oligomer
gaaggacuggauaucucugca

SEQ ID NO: 2104 - RNA, 21 nt, artificial
  Oligomer
aaggacuggauaucucugcau

SEQ ID NO: 2105 - RNA, 21 nt, artificial
  Oligomer
guauugaugcaaauggaguua

SEQ ID NO: 2106 - RNA, 21 nt, artificial
  Oligomer
ggcucugcuuagacacaaucc

SEQ ID NO: 2107 - RNA, 21 nt, artificial
  Oligomer
guaaaucucgaaaucguucug

SEQ ID NO: 2108 - RNA, 21 nt, artificial
  Oligomer
ucgaaaucguucuguccaguc

SEQ ID NO: 2109 - RNA, 21 nt, artificial
  Oligomer
gaaaucguucuguccagucuc

SEQ ID NO: 2110 - RNA, 21 nt, artificial
  Oligomer
aguuggacacauugugagggu

SEQ ID NO: 2111 - RNA, 21 nt, artificial
  Oligomer
aaauauucugagagcugguuc

SEQ ID NO: 2112 - RNA, 21 nt, artificial
  Oligomer
aagaagagguuaugaguauac

SEQ ID NO: 2113 - RNA, 21 nt, artificial
  Oligomer
ugaguauaccagaagauauca

SEQ ID NO: 2114 - RNA, 21 nt, artificial
  Oligomer
agaaaagcaggacauucaugg

SEQ ID NO: 2115 - RNA, 21 nt, artificial
  Oligomer
gaaaagcaggacauucaugga

SEQ ID NO: 2116 - RNA, 21 nt, artificial
  Oligomer
auccucaucucgguaucuugc

SEQ ID NO: 2117 - RNA, 21 nt, artificial
  Oligomer
ugcuuuuauccaacaaucucc

SEQ ID NO: 2118 - RNA, 21 nt, artificial
  Oligomer
uucggcacauggguaaaagga

SEQ ID NO: 2119 - RNA, 21 nt, artificial
  Oligomer
caaauauucuucagggucucu

SEQ ID NO: 2120 - RNA, 21 nt, artificial
  Oligomer
uggguaaaaggauaaggcugc

SEQ ID NO: 2121 - RNA, 21 nt, artificial
  Oligomer
uaaaaggauaaggcugcaguu

SEQ ID NO: 2122 - RNA, 21 nt, artificial
  Oligomer
aaaaggauaaggcugcaguug

SEQ ID NO: 2123 - RNA, 21 nt, artificial
  Oligomer
uuccgcugaguuucaaagucu

SEQ ID NO: 2124 - RNA, 21 nt, artificial
  Oligomer
ucaaagucuuagaaauugcac

SEQ ID NO: 2125 - RNA, 21 nt, artificial
  Oligomer
ucuuagaaauugcacucauuc

SEQ ID NO: 2126 - RNA, 21 nt, artificial
  Oligomer
uucagcugaaagacucuuuau

SEQ ID NO: 2127 - RNA, 21 nt, artificial
  Oligomer
aacaccaacuguuuuuccucu

SEQ ID NO: 2128 - RNA, 21 nt, artificial
  Oligomer
uugagguuaagaacagaugcu

SEQ ID NO: 2129 - RNA, 21 nt, artificial
  Oligomer
agugcaugauauuuuucucca

SEQ ID NO: 2130 - RNA, 21 nt, artificial
  Oligomer
acuggauaucucugcauaccc

SEQ ID NO: 2131 - RNA, 21 nt, artificial
  Oligomer
aaaggaccaucaauauacagc

SEQ ID NO: 2132 - RNA, 21 nt, artificial
  Oligomer
uauacagcuugggauaauuuc

SEQ ID NO: 2133 - RNA, 21 nt, artificial
  Oligomer
agauggaggcaguaguaaauc

SEQ ID NO: 2134 - RNA, 21 nt, artificial
  Oligomer
uucuguccagucuccuacuau

SEQ ID NO: 2135 - RNA, 21 nt, artificial
  Oligomer
gucuccuacuauuuuaagaug

SEQ ID NO: 2136 - RNA, 21 nt, artificial
  Oligomer
gauuuccaugacaucugaggg

SEQ ID NO: 2137 - RNA, 21 nt, artificial
  Oligomer
auguucugagaaauacucugg

SEQ ID NO: 2138 - RNA, 21 nt, artificial
  Oligomer
cuccugaaacaugcaacguca

SEQ ID NO: 2139 - RNA, 21 nt, artificial
  Oligomer
aagacaaagaagagguuauga

SEQ ID NO: 2140 - RNA, 21 nt, artificial
  Oligomer
aaaagcaggacauucauggag

SEQ ID NO: 2141 - RNA, 21 nt, artificial
  Oligomer
acagauaguaacaccacaggu

SEQ ID NO: 2142 - RNA, 21 nt, artificial
  Oligomer
agguaauauggaauguucugc

SEQ ID NO: 2143 - RNA, 21 nt, artificial
  Oligomer
ucaaucuugcauuuguucaac

SEQ ID NO: 2144 - RNA, 21 nt, artificial
  Oligomer
cacaucaaauauucuucaggg

SEQ ID NO: 2145 - RNA, 21 nt, artificial
  Oligomer
cuuagaaauugcacucauucc

SEQ ID NO: 2146 - RNA, 21 nt, artificial
  Oligomer
agaaauugcacucauuccuuc

SEQ ID NO: 2147 - RNA, 21 nt, artificial
  Oligomer
caaacaaaaguuuccaccgag

SEQ ID NO: 2148 - RNA, 21 nt, artificial
  Oligomer
ugagguuaagaacagaugcug

SEQ ID NO: 2149 - RNA, 21 nt, artificial
  Oligomer
uccaauuaucuucuguauccc

SEQ ID NO: 2150 - RNA, 21 nt, artificial
  Oligomer
uuaucuucuguaucccaucug

SEQ ID NO: 2151 - RNA, 21 nt, artificial
  Oligomer
uaucuucuguaucccaucugu

SEQ ID NO: 2152 - RNA, 21 nt, artificial
  Oligomer
uaucucugcauacccaaauaa

SEQ ID NO: 2153 - RNA, 21 nt, artificial
  Oligomer
gcauacccaaauaaaguauag

SEQ ID NO: 2154 - RNA, 21 nt, artificial
  Oligomer
guugaguauugaugcaaaugg

SEQ ID NO: 2155 - RNA, 21 nt, artificial
  Oligomer
auuucuagauugaaugaaggg

SEQ ID NO: 2156 - RNA, 21 nt, artificial
  Oligomer
uuggacacauugugaggguaa

SEQ ID NO: 2157 - RNA, 21 nt, artificial
  Oligomer
gacuuaugaccgaaaugaugg

SEQ ID NO: 2158 - RNA, 21 nt, artificial
  Oligomer
aagaagguuuuccagaaaagc

SEQ ID NO: 2159 - RNA, 21 nt, artificial
  Oligomer
guuuucuaggauccucaucuc

SEQ ID NO: 2160 - RNA, 21 nt, artificial
  Oligomer
aagcaggacauucauggagag

SEQ ID NO: 2161 - RNA, 21 nt, artificial
  Oligomer
guaacaccacagguaauaugg

SEQ ID NO: 2162 - RNA, 21 nt, artificial
  Oligomer
cacagguaauauggaauguuc

SEQ ID NO: 2163 - RNA, 21 nt, artificial
  Oligomer
acagguaauauggaauguucu

SEQ ID NO: 2164 - RNA, 21 nt, artificial
  Oligomer
ucaaagacugaguggaagccc

SEQ ID NO: 2165 - RNA, 21 nt, artificial
  Oligomer
uguucaaucuugcauuuguuc

SEQ ID NO: 2166 - RNA, 21 nt, artificial
  Oligomer
caauuuaaagaggaacacgac

SEQ ID NO: 2167 - RNA, 21 nt, artificial
  Oligomer
uuaaagaggaacacgacaauc

SEQ ID NO: 2168 - RNA, 21 nt, artificial
  Oligomer
aaagaggaacacgacaaucag

SEQ ID NO: 2169 - RNA, 21 nt, artificial
  Oligomer
caaguucagcuccucacuagg

SEQ ID NO: 2170 - RNA, 21 nt, artificial
  Oligomer
uugaauccaccaugaaaauca

SEQ ID NO: 2171 - RNA, 21 nt, artificial
  Oligomer
augaaaaucaacagugugcau

SEQ ID NO: 2172 - RNA, 21 nt, artificial
  Oligomer
uugccacauucucacauuucc

SEQ ID NO: 2173 - RNA, 21 nt, artificial
  Oligomer
uuagaaauugcacucauuccu

SEQ ID NO: 2174 - RNA, 21 nt, artificial
  Oligomer
aggauaaggcugcaguugagg

SEQ ID NO: 2175 - RNA, 21 nt, artificial
  Oligomer
uucuuuagaguccugcuucau

SEQ ID NO: 2176 - RNA, 21 nt, artificial
  Oligomer
cuuuagaguccugcuucaugg

SEQ ID NO: 2177 - RNA, 21 nt, artificial
  Oligomer
auaugaguuguucugguuacu

SEQ ID NO: 2178 - RNA, 21 nt, artificial
  Oligomer
uggguccacaacagaaaacac

SEQ ID NO: 2179 - RNA, 21 nt, artificial
  Oligomer
acaccaacuguuuuuccucug

SEQ ID NO: 2180 - RNA, 21 nt, artificial
  Oligomer
caccaacuguuuuuccucugu

SEQ ID NO: 2181 - RNA, 21 nt, artificial
  Oligomer
cugcauacccaaauaaaguau

SEQ ID NO: 2182 - RNA, 21 nt, artificial
  Oligomer
aguuacuccaaugccuccagc

SEQ ID NO: 2183 - RNA, 21 nt, artificial
  Oligomer
caaaaggaccaucaauauaca

SEQ ID NO: 2184 - RNA, 21 nt, artificial
  Oligomer
aucucgaaaucguucugucca

SEQ ID NO: 2185 - RNA, 21 nt, artificial
  Oligomer
gauauaccuguaaagucuuuc

SEQ ID NO: 2186 - RNA, 21 nt, artificial
  Oligomer
cagaaauccaaagccaagucu

SEQ ID NO: 2187 - RNA, 21 nt, artificial
  Oligomer
accagaagauaucauaguuag

SEQ ID NO: 2188 - RNA, 21 nt, artificial
  Oligomer
caugaggaauagcaccaccac

SEQ ID NO: 2189 - RNA, 21 nt, artificial
  Oligomer
aaagcaggacauucauggaga

SEQ ID NO: 2190 - RNA, 21 nt, artificial
  Oligomer
aguucaacaaagucuucacug

SEQ ID NO: 2191 - RNA, 21 nt, artificial
  Oligomer
uucaacaaagucuucacugua

SEQ ID NO: 2192 - RNA, 21 nt, artificial
  Oligomer
guaauauggaauguucugcuu

SEQ ID NO: 2193 - RNA, 21 nt, artificial
  Oligomer
gaauccaccaugaaaaucaac

SEQ ID NO: 2194 - RNA, 21 nt, artificial
  Oligomer
uccaccaugaaaaucaacagu

SEQ ID NO: 2195 - RNA, 21 nt, artificial
  Oligomer
accaugaaaaucaacagugug

SEQ ID NO: 2196 - RNA, 21 nt, artificial
  Oligomer
gaaaaucaacagugugcaucu

SEQ ID NO: 2197 - RNA, 21 nt, artificial
  Oligomer
aaaucaacagugugcaucuaa

SEQ ID NO: 2198 - RNA, 21 nt, artificial
  Oligomer
aucaacagugugcaucuaaca

SEQ ID NO: 2199 - RNA, 21 nt, artificial
  Oligomer
aucaaauauucuucagggucu

SEQ ID NO: 2200 - RNA, 21 nt, artificial
  Oligomer
ucaaauauucuucagggucuc

SEQ ID NO: 2201 - RNA, 21 nt, artificial
  Oligomer
ugccacauucucacauuucca

SEQ ID NO: 2202 - RNA, 21 nt, artificial
  Oligomer
aaaggauaaggcugcaguuga

SEQ ID NO: 2203 - RNA, 21 nt, artificial
  Oligomer
auuccgcugaguuucaaaguc

SEQ ID NO: 2204 - RNA, 21 nt, artificial
  Oligomer
auucaaaucuugucccauaug

SEQ ID NO: 2205 - RNA, 21 nt, artificial
  Oligomer
uucaaaucuugucccauauga

SEQ ID NO: 2206 - RNA, 21 nt, artificial
  Oligomer
ucaaaucuugucccauaugag

SEQ ID NO: 2207 - RNA, 21 nt, artificial
  Oligomer
caguuuaugaagagucuugga

SEQ ID NO: 2208 - RNA, 21 nt, artificial
  Oligomer
uuggguccacaacagaaaaca

SEQ ID NO: 2209 - RNA, 21 nt, artificial
  Oligomer
cacaacagaaaacaccaacug

SEQ ID NO: 2210 - RNA, 21 nt, artificial
  Oligomer
acguccuauaaacagucuuga

SEQ ID NO: 2211 - RNA, 21 nt, artificial
  Oligomer
aauuaucuucuguaucccauc

SEQ ID NO: 2212 - RNA, 21 nt, artificial
  Oligomer
auuaucuucuguaucccaucu

SEQ ID NO: 2213 - RNA, 21 nt, artificial
  Oligomer
uucggagucuugacuagaugg

SEQ ID NO: 2214 - RNA, 21 nt, artificial
  Oligomer
agaguaauauacugaccaggu

SEQ ID NO: 2215 - RNA, 21 nt, artificial
  Oligomer
agaaauccaaagccaagucug

SEQ ID NO: 2216 - RNA, 21 nt, artificial
  Oligomer
uucaguucaacaaagucuuca

SEQ ID NO: 2217 - RNA, 21 nt, artificial
  Oligomer
gaguucuugaauccaccauga

SEQ ID NO: 2218 - RNA, 21 nt, artificial
  Oligomer
caugaaaaucaacagugugca

SEQ ID NO: 2219 - RNA, 21 nt, artificial
  Oligomer
acaucaaauauucuucagggu

SEQ ID NO: 2220 - RNA, 21 nt, artificial
  Oligomer
caucaaauauucuucaggguc

SEQ ID NO: 2221 - RNA, 21 nt, artificial
  Oligomer
uuuaugaagagucuuggauag

SEQ ID NO: 2222 - RNA, 21 nt, artificial
  Oligomer
uuaugaagagucuuggauagu

SEQ ID NO: 2223 - RNA, 21 nt, artificial
  Oligomer
uaugaagagucuuggauagug

SEQ ID NO: 2224 - RNA, 21 nt, artificial
  Oligomer
gauuuucuaaugcagauacac

SEQ ID NO: 2225 - RNA, 21 nt, artificial
  Oligomer
aaauccaaagccaagucugug

SEQ ID NO: 2226 - RNA, 21 nt, artificial
  Oligomer
ucaguucaacaaagucuucac

SEQ ID NO: 2227 - RNA, 21 nt, artificial
  Oligomer
uaguaacaccacagguaauau

SEQ ID NO: 2228 - RNA, 21 nt, artificial
  Oligomer
aauuuaaagaggaacacgaca

SEQ ID NO: 2229 - RNA, 21 nt, artificial
  Oligomer
uaaagaggaacacgacaauca

SEQ ID NO: 2230 - RNA, 21 nt, artificial
  Oligomer
gaacacgacaaucagccuuag

SEQ ID NO: 2231 - RNA, 21 nt, artificial
  Oligomer
ucacaucaaauauucuucagg

SEQ ID NO: 2232 - RNA, 21 nt, artificial
  Oligomer
cuugccacauucucacauuuc

SEQ ID NO: 2233 - RNA, 21 nt, artificial
  Oligomer
cuucauggcaaaaguuuucag

SEQ ID NO: 2234 - RNA, 21 nt, artificial
  Oligomer
cuccaauuaucuucuguaucc

SEQ ID NO: 2235 - RNA, 21 nt, artificial
  Oligomer
aucuucuguaucccaucuguu

SEQ ID NO: 2236 - RNA, 21 nt, artificial
  Oligomer
gaguuacuccaaugccuccag

SEQ ID NO: 2237 - RNA, 21 nt, artificial
  Oligomer
guggagguagugauacucugg

SEQ ID NO: 2238 - RNA, 21 nt, artificial
  Oligomer
uuuucuaaugcagauacacug

SEQ ID NO: 2239 - RNA, 21 nt, artificial
  Oligomer
uucuuugaccauucggauuuc

SEQ ID NO: 2240 - RNA, 21 nt, artificial
  Oligomer
ucuuugaccauucggauuucc

SEQ ID NO: 2241 - RNA, 21 nt, artificial
  Oligomer
augauggugacuggcuuauug

SEQ ID NO: 2242 - RNA, 21 nt, artificial
  Oligomer
aggaaauauucugagagcugg

SEQ ID NO: 2243 - RNA, 21 nt, artificial
  Oligomer
ugcauucaguucaacaaaguc

SEQ ID NO: 2244 - RNA, 21 nt, artificial
  Oligomer
caguucaacaaagucuucacu

SEQ ID NO: 2245 - RNA, 21 nt, artificial
  Oligomer
agcaggacauucauggagagc

SEQ ID NO: 2246 - RNA, 21 nt, artificial
  Oligomer
aagaggaacacgacaaucagc

SEQ ID NO: 2247 - RNA, 21 nt, artificial
  Oligomer
gaggaacacgacaaucagccu

SEQ ID NO: 2248 - RNA, 21 nt, artificial
  Oligomer
aacacgacaaucagccuuaga

SEQ ID NO: 2249 - RNA, 21 nt, artificial
  Oligomer
uuaaacauguaaugugacggu

SEQ ID NO: 2250 - RNA, 21 nt, artificial
  Oligomer
ucuguaucccaucuguuugac

SEQ ID NO: 2251 - RNA, 21 nt, artificial
  Oligomer
guaucccaucuguuugacuga

SEQ ID NO: 2252 - RNA, 21 nt, artificial
  Oligomer
ucaaauggacuuccaaaagga

SEQ ID NO: 2253 - RNA, 21 nt, artificial
  Oligomer
acacauugugaggguaaaugg

SEQ ID NO: 2254 - RNA, 21 nt, artificial
  Oligomer
uauacugaccaggucuugcuu

SEQ ID NO: 2255 - RNA, 21 nt, artificial
  Oligomer
ugauggugacuggcuuauugc

SEQ ID NO: 2256 - RNA, 21 nt, artificial
  Oligomer
auuaguuugauacuucagcag

SEQ ID NO: 2257 - RNA, 21 nt, artificial
  Oligomer
uuaguuugauacuucagcagc

SEQ ID NO: 2258 - RNA, 21 nt, artificial
  Oligomer
gacaaagaagagguuaugagu

SEQ ID NO: 2259 - RNA, 21 nt, artificial
  Oligomer
uggaauguucugcuuuuaucc

SEQ ID NO: 2260 - RNA, 21 nt, artificial
  Oligomer
aucuccugguucuccugcuug

SEQ ID NO: 2261 - RNA, 21 nt, artificial
  Oligomer
auguaaugugacggucaucuu

SEQ ID NO: 2262 - RNA, 21 nt, artificial
  Oligomer
uguaaugugacggucaucuug

SEQ ID NO: 2263 - RNA, 21 nt, artificial
  Oligomer
ucaucuugccacauucucaca

SEQ ID NO: 2264 - RNA, 21 nt, artificial
  Oligomer
uugaaugaagggcagaauuuc

SEQ ID NO: 2265 - RNA, 21 nt, artificial
  Oligomer
aucaugaggaauagcaccacc

SEQ ID NO: 2266 - RNA, 21 nt, artificial
  Oligomer
agaggaacacgacaaucagcc

SEQ ID NO: 2267 - RNA, 21 nt, artificial
  Oligomer
uucuguaucccaucuguuuga

SEQ ID NO: 2268 - RNA, 21 nt, artificial
  Oligomer
uaucccaucuguuugacugag

SEQ ID NO: 2269 - RNA, 21 nt, artificial
  Oligomer
auauacugaccaggucuugcu

SEQ ID NO: 2270 - RNA, 21 nt, artificial
  Oligomer
uaauucacugagaaguugagg

SEQ ID NO: 2271 - RNA, 21 nt, artificial
  Oligomer
aauucacugagaaguugaggg

SEQ ID NO: 2272 - RNA, 21 nt, artificial
  Oligomer
gagguaagccaagaguguucg

SEQ ID NO: 2273 - RNA, 21 nt, artificial
  Oligomer
uugaguauugaugcaaaugga

SEQ ID NO: 2274 - RNA, 21 nt, artificial
  Oligomer
aaauggaguuacuccaaugcc

SEQ ID NO: 2275 - RNA, 21 nt, artificial
  Oligomer
aaugaagggcagaauuucgga

SEQ ID NO: 2276 - RNA, 21 nt, artificial
  Oligomer
gucuguggaaaauuagcuugg

SEQ ID NO: 2277 - RNA, 21 nt, artificial
  Oligomer
uaguuugauacuucagcagcc

SEQ ID NO: 2278 - RNA, 21 nt, artificial
  Oligomer
uugugaagagaaguuuucuag

SEQ ID NO: 2279 - RNA, 21 nt, artificial
  Oligomer
auucacugagaaguugagggc

SEQ ID NO: 2280 - RNA, 21 nt, artificial
  Oligomer
uugagggcauucaccagaugg

SEQ ID NO: 2281 - RNA, 21 nt, artificial
  Oligomer
cuucagggucucuuugguuuc

SEQ ID NO: 2282 - RNA, 21 nt, artificial
  Oligomer
caggguguugaguauugaugc

SEQ ID NO: 2283 - RNA, 21 nt, artificial
  Oligomer
caguuggacacauugugaggg

SEQ ID NO: 2284 - RNA, 21 nt, artificial
  Oligomer
auguagaguaauauacugacc

SEQ ID NO: 2285 - RNA, 21 nt, artificial
  Oligomer
gaccauucggauuuccaugac

SEQ ID NO: 2286 - RNA, 21 nt, artificial
  Oligomer
uuagcuuggaaucugggcucu

SEQ ID NO: 2287 - RNA, 21 nt, artificial
  Oligomer
aauguucugagaaauacucug

SEQ ID NO: 2288 - RNA, 21 nt, artificial
  Oligomer
aauguucugcuuuuauccaac

SEQ ID NO: 2289 - RNA, 21 nt, artificial
  Oligomer
auguucugcuuuuauccaaca

SEQ ID NO: 2290 - RNA, 21 nt, artificial
  Oligomer
ucugcuuuuauccaacaaucu

SEQ ID NO: 2291 - RNA, 21 nt, artificial
  Oligomer
uucuucagggucucuuugguu

SEQ ID NO: 2292 - RNA, 21 nt, artificial
  Oligomer
uuucuagauugaaugaagggc

SEQ ID NO: 2293 - RNA, 21 nt, artificial
  Oligomer
uuucaguuggacacauuguga

SEQ ID NO: 2294 - RNA, 21 nt, artificial
  Oligomer
uaugaccgaaaugauggugac

SEQ ID NO: 2295 - RNA, 21 nt, artificial
  Oligomer
agucuguggaaaauuagcuug

SEQ ID NO: 2296 - RNA, 21 nt, artificial
  Oligomer
uacucugguaaggaaauauuc

SEQ ID NO: 2297 - RNA, 21 nt, artificial
  Oligomer
uagaagacaaagaagagguua

SEQ ID NO: 2298 - RNA, 21 nt, artificial
  Oligomer
gaucaugaggaauagcaccac

SEQ ID NO: 2299 - RNA, 21 nt, artificial
  Oligomer
ugugaagagaaguuuucuagg

SEQ ID NO: 2300 - RNA, 21 nt, artificial
  Oligomer
uucugcuuuuauccaacaauc

SEQ ID NO: 2301 - RNA, 21 nt, artificial
  Oligomer
uucagggucucuuugguuucc

SEQ ID NO: 2302 - RNA, 21 nt, artificial
  Oligomer
ugaguauugaugcaaauggag

SEQ ID NO: 2303 - RNA, 21 nt, artificial
  Oligomer
gagucuugacuagauggaggc

SEQ ID NO: 2304 - RNA, 21 nt, artificial
  Oligomer
uaauauacugaccaggucuug

SEQ ID NO: 2305 - RNA, 21 nt, artificial
  Oligomer
aaauccuucagggaaagguuc

SEQ ID NO: 2306 - RNA, 21 nt, artificial
  Oligomer
auguagaagacaaagaagagg

SEQ ID NO: 2307 - RNA, 21 nt, artificial
  Oligomer
agguaagccaagaguguucgg

SEQ ID NO: 2308 - RNA, 21 nt, artificial
  Oligomer
aagaguguucggcacaugggu

SEQ ID NO: 2309 - RNA, 21 nt, artificial
  Oligomer
uacagaguaaaucugcaaacc

SEQ ID NO: 2310 - RNA, 21 nt, artificial
  Oligomer
aaauggacuuccaaaaggacc

SEQ ID NO: 2311 - RNA, 21 nt, artificial
  Oligomer
agucuugacuagauggaggca

SEQ ID NO: 2312 - RNA, 21 nt, artificial
  Oligomer
aauauacugaccaggucuugc

SEQ ID NO: 2313 - RNA, 21 nt, artificial
  Oligomer
uacucuggcccuugguuauac

SEQ ID NO: 2314 - RNA, 21 nt, artificial
  Oligomer
aaagguccagaaauccaaagc

SEQ ID NO: 2315 - RNA, 21 nt, artificial
  Oligomer
aaaauuagcuuggaaucuggg

SEQ ID NO: 2316 - RNA, 21 nt, artificial
  Oligomer
auuugugcuggguaaacucug

SEQ ID NO: 2317 - RNA, 21 nt, artificial
  Oligomer
uugugcuggguaaacucugcc

SEQ ID NO: 2318 - RNA, 21 nt, artificial
  Oligomer
ugguucgguuaagacugaugc

SEQ ID NO: 2319 - RNA, 21 nt, artificial
  Oligomer
aagguuuuccagaaaagcagg

SEQ ID NO: 2320 - RNA, 21 nt, artificial
  Oligomer
cauguagaagacaaagaagag

SEQ ID NO: 2321 - RNA, 21 nt, artificial
  Oligomer
uguagaagacaaagaagaggu

SEQ ID NO: 2322 - RNA, 21 nt, artificial
  Oligomer
uucacugagaaguugagggca

SEQ ID NO: 2323 - RNA, 21 nt, artificial
  Oligomer
uauccaacaaucuccugguuc

SEQ ID NO: 2324 - RNA, 21 nt, artificial
  Oligomer
agauugagcaaguucagcucc

SEQ ID NO: 2325 - RNA, 21 nt, artificial
  Oligomer
uugagcaaguucagcuccuca

SEQ ID NO: 2326 - RNA, 21 nt, artificial
  Oligomer
uauucuucagggucucuuugg

SEQ ID NO: 2327 - RNA, 21 nt, artificial
  Oligomer
auuaaacauguaaugugacgg

SEQ ID NO: 2328 - RNA, 21 nt, artificial
  Oligomer
aacacagcugauugauuccgc

SEQ ID NO: 2329 - RNA, 21 nt, artificial
  Oligomer
uuggauagugaauugggucca

SEQ ID NO: 2330 - RNA, 21 nt, artificial
  Oligomer
aaaaguuuccaccgaggacgu

SEQ ID NO: 2331 - RNA, 21 nt, artificial
  Oligomer
uacagcuggauguugacauag

SEQ ID NO: 2332 - RNA, 21 nt, artificial
  Oligomer
caacauacagaguaaaucugc

SEQ ID NO: 2333 - RNA, 21 nt, artificial
  Oligomer
aaaucugcaaaccaacggaag

SEQ ID NO: 2334 - RNA, 21 nt, artificial
  Oligomer
caaauggaguuacuccaaugc

SEQ ID NO: 2335 - RNA, 21 nt, artificial
  Oligomer
caaauggacuuccaaaaggac

SEQ ID NO: 2336 - RNA, 21 nt, artificial
  Oligomer
aaauguugcuuugguuucagu

SEQ ID NO: 2337 - RNA, 21 nt, artificial
  Oligomer
ucaguuggacacauugugagg

SEQ ID NO: 2338 - RNA, 21 nt, artificial
  Oligomer
uuucuaaugcagauacacugg

SEQ ID NO: 2339 - RNA, 21 nt, artificial
  Oligomer
uucuaaugcagauacacuggg

SEQ ID NO: 2340 - RNA, 21 nt, artificial
  Oligomer
aucugagggaugacuuaugac

SEQ ID NO: 2341 - RNA, 21 nt, artificial
  Oligomer
uuaugaccgaaaugaugguga

SEQ ID NO: 2342 - RNA, 21 nt, artificial
  Oligomer
augaccgaaaugauggugacu

SEQ ID NO: 2343 - RNA, 21 nt, artificial
  Oligomer
gaccgaaaugauggugacugg

SEQ ID NO: 2344 - RNA, 21 nt, artificial
  Oligomer
ucuguggaaaauuagcuugga

SEQ ID NO: 2345 - RNA, 21 nt, artificial
  Oligomer
uuugugcuggguaaacucugc

SEQ ID NO: 2346 - RNA, 21 nt, artificial
  Oligomer
uguucugagaaauacucuggu

SEQ ID NO: 2347 - RNA, 21 nt, artificial
  Oligomer
gaaacaugcaacgucagcagc

SEQ ID NO: 2348 - RNA, 21 nt, artificial
  Oligomer
agcauguagaagacaaagaag

SEQ ID NO: 2349 - RNA, 21 nt, artificial
  Oligomer
uuauugcauauguagaggcug

SEQ ID NO: 2350 - RNA, 21 nt, artificial
  Oligomer
ugugaucaugaggaauagcac

SEQ ID NO: 2351 - RNA, 21 nt, artificial
  Oligomer
augaggaauagcaccaccacc

SEQ ID NO: 2352 - RNA, 21 nt, artificial
  Oligomer
uguaauucacugagaaguuga

SEQ ID NO: 2353 - RNA, 21 nt, artificial
  Oligomer
ugagaaguugagggcauucac

SEQ ID NO: 2354 - RNA, 21 nt, artificial
  Oligomer
auugagcaaguucagcuccuc

SEQ ID NO: 2355 - RNA, 21 nt, artificial
  Oligomer
gucauccaacaggguguugag

SEQ ID NO: 2356 - RNA, 21 nt, artificial
  Oligomer
caacaggguguugaguauuga

SEQ ID NO: 2357 - RNA, 21 nt, artificial
  Oligomer
aauuucggagucuugacuaga

SEQ ID NO: 2358 - RNA, 21 nt, artificial
  Oligomer
uuucggagucuugacuagaug

SEQ ID NO: 2359 - RNA, 21 nt, artificial
  Oligomer
ugguggagguagugauacucu

SEQ ID NO: 2360 - RNA, 21 nt, artificial
  Oligomer
aauguugcuuugguuucaguu

SEQ ID NO: 2361 - RNA, 21 nt, artificial
  Oligomer
cugagggaugacuuaugaccg

SEQ ID NO: 2362 - RNA, 21 nt, artificial
  Oligomer
aaauuagcuuggaaucugggc

SEQ ID NO: 2363 - RNA, 21 nt, artificial
  Oligomer
auuagcuuggaaucugggcuc

SEQ ID NO: 2364 - RNA, 21 nt, artificial
  Oligomer
gguuuugaaaauccuucaggg

SEQ ID NO: 2365 - RNA, 21 nt, artificial
  Oligomer
aauccuucagggaaagguuca

SEQ ID NO: 2366 - RNA, 21 nt, artificial
  Oligomer
uacagcaagaagguuuuccag

SEQ ID NO: 2367 - RNA, 21 nt, artificial
  Oligomer
gaggguggguaucuaaauuag

SEQ ID NO: 2368 - RNA, 21 nt, artificial
  Oligomer
aguuugauacuucagcagccc

SEQ ID NO: 2369 - RNA, 21 nt, artificial
  Oligomer
ucaugaggaauagcaccacca

SEQ ID NO: 2370 - RNA, 21 nt, artificial
  Oligomer
aagagaaguuuucuaggaucc

SEQ ID NO: 2371 - RNA, 21 nt, artificial
  Oligomer
uaagccaagaguguucggcac

SEQ ID NO: 2372 - RNA, 21 nt, artificial
  Oligomer
uagauugagcaaguucagcuc

SEQ ID NO: 2373 - RNA, 21 nt, artificial
  Oligomer
uagggaguucuugaauccacc

SEQ ID NO: 2374 - RNA, 21 nt, artificial
  Oligomer
aaaaguuuucagcugaaagac

SEQ ID NO: 2375 - RNA, 21 nt, artificial
  Oligomer
uucugguuacucaguuuauga

SEQ ID NO: 2376 - RNA, 21 nt, artificial
  Oligomer
auguugacauagucaggucug

SEQ ID NO: 2377 - RNA, 21 nt, artificial
  Oligomer
uagucaggucuguucucuugc

SEQ ID NO: 2378 - RNA, 21 nt, artificial
  Oligomer
aacauacagaguaaaucugca

SEQ ID NO: 2379 - RNA, 21 nt, artificial
  Oligomer
auacagaguaaaucugcaaac

SEQ ID NO: 2380 - RNA, 21 nt, artificial
  Oligomer
aaucugcaaaccaacggaagg

SEQ ID NO: 2381 - RNA, 21 nt, artificial
  Oligomer
caacggaaggacuggauaucu

SEQ ID NO: 2382 - RNA, 21 nt, artificial
  Oligomer
accucauaguucagugauucc

SEQ ID NO: 2383 - RNA, 21 nt, artificial
  Oligomer
gugauuccucaaauggacuuc

SEQ ID NO: 2384 - RNA, 21 nt, artificial
  Oligomer
uggaggcaguaguaaaucucg

SEQ ID NO: 2385 - RNA, 21 nt, artificial
  Oligomer
uggagguagugauacucuggc

SEQ ID NO: 2386 - RNA, 21 nt, artificial
  Oligomer
auggaugauuuucuaaugcag

SEQ ID NO: 2387 - RNA, 21 nt, artificial
  Oligomer
guagugauacucuggcccuug

SEQ ID NO: 2388 - RNA, 21 nt, artificial
  Oligomer
caucugagggaugacuuauga

SEQ ID NO: 2389 - RNA, 21 nt, artificial
  Oligomer
cucuggcccuugguuauacag

SEQ ID NO: 2390 - RNA, 21 nt, artificial
  Oligomer
uaaagucuuucggcacaguac

SEQ ID NO: 2391 - RNA, 21 nt, artificial
  Oligomer
aagucuuucggcacaguacag

SEQ ID NO: 2392 - RNA, 21 nt, artificial
  Oligomer
ucuuccauacaaaucuucaca

SEQ ID NO: 2393 - RNA, 21 nt, artificial
  Oligomer
aaucuucacaaauuugugcug

SEQ ID NO: 2394 - RNA, 21 nt, artificial
  Oligomer
aucuucacaaauuugugcugg

SEQ ID NO: 2395 - RNA, 21 nt, artificial
  Oligomer
aauuugugcuggguaaacucu

SEQ ID NO: 2396 - RNA, 21 nt, artificial
  Oligomer
ucugccgguuuugaaaauccu

SEQ ID NO: 2397 - RNA, 21 nt, artificial
  Oligomer
uucugagaaauacucugguaa

SEQ ID NO: 2398 - RNA, 21 nt, artificial
  Oligomer
uuaagacugaugcagccggga

SEQ ID NO: 2399 - RNA, 21 nt, artificial
  Oligomer
aguugugaagagaaguuuucu

SEQ ID NO: 2400 - RNA, 21 nt, artificial
  Oligomer
uuauccaacaaucuccugguu

SEQ ID NO: 2401 - RNA, 21 nt, artificial
  Oligomer
aacaaucuccugguucuccug

SEQ ID NO: 2402 - RNA, 21 nt, artificial
  Oligomer
ucagggucucuuugguuucca

SEQ ID NO: 2403 - RNA, 21 nt, artificial
  Oligomer
auucuuuggcauaacacagcu

SEQ ID NO: 2404 - RNA, 21 nt, artificial
  Oligomer
acucauuccuucuuuagaguc

SEQ ID NO: 2405 - RNA, 21 nt, artificial
  Oligomer
uuuagaguccugcuucauggc

SEQ ID NO: 2406 - RNA, 21 nt, artificial
  Oligomer
cuuggauagugaauugggucc

SEQ ID NO: 2407 - RNA, 21 nt, artificial
  Oligomer
uggauagugaauuggguccac

SEQ ID NO: 2408 - RNA, 21 nt, artificial
  Oligomer
aaacaccaacuguuuuuccuc

SEQ ID NO: 2409 - RNA, 21 nt, artificial
  Oligomer
aaaguuuccaccgaggacguc

SEQ ID NO: 2410 - RNA, 21 nt, artificial
  Oligomer
aaacagucuugaauucagugc

SEQ ID NO: 2411 - RNA, 21 nt, artificial
  Oligomer
uaagaacagaugcugaggcuc

SEQ ID NO: 2412 - RNA, 21 nt, artificial
  Oligomer
aacuuguuaugcaacauacag

SEQ ID NO: 2413 - RNA, 21 nt, artificial
  Oligomer
aacggaaggacuggauaucuc

SEQ ID NO: 2414 - RNA, 21 nt, artificial
  Oligomer
augcugaggcucugcuuagac

SEQ ID NO: 2415 - RNA, 21 nt, artificial
  Oligomer
ugauuccucaaauggacuucc

SEQ ID NO: 2416 - RNA, 21 nt, artificial
  Oligomer
aagggcagaauuucggagucu

SEQ ID NO: 2417 - RNA, 21 nt, artificial
  Oligomer
aucugguggagguagugauac

SEQ ID NO: 2418 - RNA, 21 nt, artificial
  Oligomer
auggaggcaguaguaaaucuc

SEQ ID NO: 2419 - RNA, 21 nt, artificial
  Oligomer
ugguuucaguuggacacauug

SEQ ID NO: 2420 - RNA, 21 nt, artificial
  Oligomer
agguagugauacucuggcccu

SEQ ID NO: 2421 - RNA, 21 nt, artificial
  Oligomer
auacacugggacaauguagag

SEQ ID NO: 2422 - RNA, 21 nt, artificial
  Oligomer
augacaucugagggaugacuu

SEQ ID NO: 2423 - RNA, 21 nt, artificial
  Oligomer
auggugacuggcuuauugcuc

SEQ ID NO: 2424 - RNA, 21 nt, artificial
  Oligomer
uuauugcuccggauauaccug

SEQ ID NO: 2425 - RNA, 21 nt, artificial
  Oligomer
aaacaugcaacgucagcagca

SEQ ID NO: 2426 - RNA, 21 nt, artificial
  Oligomer
gugaucaugaggaauagcacc

SEQ ID NO: 2427 - RNA, 21 nt, artificial
  Oligomer
aauagcaccaccaccaugcag

SEQ ID NO: 2428 - RNA, 21 nt, artificial
  Oligomer
uuuauccaacaaucuccuggu

SEQ ID NO: 2429 - RNA, 21 nt, artificial
  Oligomer
aaucagccuuagauugagcaa

SEQ ID NO: 2430 - RNA, 21 nt, artificial
  Oligomer
aaguucagcuccucacuaggg

SEQ ID NO: 2431 - RNA, 21 nt, artificial
  Oligomer
uaaacauguaaugugacgguc

SEQ ID NO: 2432 - RNA, 21 nt, artificial
  Oligomer
uucuuuggcauaacacagcug

SEQ ID NO: 2433 - RNA, 21 nt, artificial
  Oligomer
guuaagaacagaugcugaggc

SEQ ID NO: 2434 - RNA, 21 nt, artificial
  Oligomer
uuguuaugcaacauacagagu

SEQ ID NO: 2435 - RNA, 21 nt, artificial
  Oligomer
uuguaugguuuccagucaucc

SEQ ID NO: 2436 - RNA, 21 nt, artificial
  Oligomer
aauggaguuacuccaaugccu

SEQ ID NO: 2437 - RNA, 21 nt, artificial
  Oligomer
auuccucaaauggacuuccaa

SEQ ID NO: 2438 - RNA, 21 nt, artificial
  Oligomer
gcuuagacacaauccuagccc

SEQ ID NO: 2439 - RNA, 21 nt, artificial
  Oligomer
accaucaauauacagcuuggg

SEQ ID NO: 2440 - RNA, 21 nt, artificial
  Oligomer
uucaguuggacacauugugag

SEQ ID NO: 2441 - RNA, 21 nt, artificial
  Oligomer
uaaugcagauacacugggaca

SEQ ID NO: 2442 - RNA, 21 nt, artificial
  Oligomer
auuuucuuugaccauucggau

SEQ ID NO: 2443 - RNA, 21 nt, artificial
  Oligomer
accuguaaagucuuucggcac

SEQ ID NO: 2444 - RNA, 21 nt, artificial
  Oligomer
ugagaaauacucugguaagga

SEQ ID NO: 2445 - RNA, 21 nt, artificial
  Oligomer
uaaggaaauauucugagagcu

SEQ ID NO: 2446 - RNA, 21 nt, artificial
  Oligomer
auauucugagagcugguucgg

SEQ ID NO: 2447 - RNA, 21 nt, artificial
  Oligomer
aagagguuaugaguauaccag

SEQ ID NO: 2448 - RNA, 21 nt, artificial
  Oligomer
cuuauugcauauguagaggcu

SEQ ID NO: 2449 - RNA, 21 nt, artificial
  Oligomer
uauugcauauguagaggcugu

SEQ ID NO: 2450 - RNA, 21 nt, artificial
  Oligomer
uugcauauguagaggcuguga

SEQ ID NO: 2451 - RNA, 21 nt, artificial
  Oligomer
gucuucacuguaauucacuga

SEQ ID NO: 2452 - RNA, 21 nt, artificial
  Oligomer
acaaucuccugguucuccugc

SEQ ID NO: 2453 - RNA, 21 nt, artificial
  Oligomer
auggagagccagaugaacagg

SEQ ID NO: 2454 - RNA, 21 nt, artificial
  Oligomer
cacuagggaguucuugaaucc

SEQ ID NO: 2455 - RNA, 21 nt, artificial
  Oligomer
auucuucagggucucuuuggu

SEQ ID NO: 2456 - RNA, 21 nt, artificial
  Oligomer
aaacauguaaugugacgguca

SEQ ID NO: 2457 - RNA, 21 nt, artificial
  Oligomer
uuggcauaacacagcugauug

SEQ ID NO: 2458 - RNA, 21 nt, artificial
  Oligomer
auggcaaaaguuuucagcuga

SEQ ID NO: 2459 - RNA, 21 nt, artificial
  Oligomer
aguuuucagcugaaagacucu

SEQ ID NO: 2460 - RNA, 21 nt, artificial
  Oligomer
uuguucugguuacucaguuua

SEQ ID NO: 2461 - RNA, 21 nt, artificial
  Oligomer
ucagugcaugauauuuuucuc

SEQ ID NO: 2462 - RNA, 21 nt, artificial
  Oligomer
uguuugacugagguacagcug

SEQ ID NO: 2463 - RNA, 21 nt, artificial
  Oligomer
uaaaucugcaaaccaacggaa

SEQ ID NO: 2464 - RNA, 21 nt, artificial
  Oligomer
acggaaggacuggauaucucu

SEQ ID NO: 2465 - RNA, 21 nt, artificial
  Oligomer
cugcuuagacacaauccuagc

SEQ ID NO: 2466 - RNA, 21 nt, artificial
  Oligomer
ugcuuagacacaauccuagcc

SEQ ID NO: 2467 - RNA, 21 nt, artificial
  Oligomer
gaccaucaauauacagcuugg

SEQ ID NO: 2468 - RNA, 21 nt, artificial
  Oligomer
cuugggauaauuucuagauug

SEQ ID NO: 2469 - RNA, 21 nt, artificial
  Oligomer
aacaucugguggagguaguga

SEQ ID NO: 2470 - RNA, 21 nt, artificial
  Oligomer
augaagggcagaauuucggag

SEQ ID NO: 2471 - RNA, 21 nt, artificial
  Oligomer
cugguggagguagugauacuc

SEQ ID NO: 2472 - RNA, 21 nt, artificial
  Oligomer
auguugcuuugguuucaguug

SEQ ID NO: 2473 - RNA, 21 nt, artificial
  Oligomer
uguugcuuugguuucaguugg

SEQ ID NO: 2474 - RNA, 21 nt, artificial
  Oligomer
cuaaugcagauacacugggac

SEQ ID NO: 2475 - RNA, 21 nt, artificial
  Oligomer
uggugacuggcuuauugcucc

SEQ ID NO: 2476 - RNA, 21 nt, artificial
  Oligomer
aagguccagaaauccaaagcc

SEQ ID NO: 2477 - RNA, 21 nt, artificial
  Oligomer
cgguuuugaaaauccuucagg

SEQ ID NO: 2478 - RNA, 21 nt, artificial
  Oligomer
guaaggaaauauucugagagc

SEQ ID NO: 2479 - RNA, 21 nt, artificial
  Oligomer
gagagcugguucgguuaagac

SEQ ID NO: 2480 - RNA, 21 nt, artificial
  Oligomer
uucgguuaagacugaugcagc

SEQ ID NO: 2481 - RNA, 21 nt, artificial
  Oligomer
ugaaacaugcaacgucagcag

SEQ ID NO: 2482 - RNA, 21 nt, artificial
  Oligomer
uuucuaggauccucaucucgg

SEQ ID NO: 2483 - RNA, 21 nt, artificial
  Oligomer
ucuucacuguaauucacugag

SEQ ID NO: 2484 - RNA, 21 nt, artificial
  Oligomer
guaagccaagaguguucggca

SEQ ID NO: 2485 - RNA, 21 nt, artificial
  Oligomer
agccuuagauugagcaaguuc

SEQ ID NO: 2486 - RNA, 21 nt, artificial
  Oligomer
cuuagauugagcaaguucagc

SEQ ID NO: 2487 - RNA, 21 nt, artificial
  Oligomer
uuagauugagcaaguucagcu

SEQ ID NO: 2488 - RNA, 21 nt, artificial
  Oligomer
gaaaagugaaucaucacauca

SEQ ID NO: 2489 - RNA, 21 nt, artificial
  Oligomer
auaaggcugcaguugagguua

SEQ ID NO: 2490 - RNA, 21 nt, artificial
  Oligomer
augaacaggcagagguguuua

SEQ ID NO: 2491 - RNA, 21 nt, artificial
  Oligomer
uaugaguuguucugguuacuc

SEQ ID NO: 2492 - RNA, 21 nt, artificial
  Oligomer
aacagucuugaauucagugca

SEQ ID NO: 2493 - RNA, 21 nt, artificial
  Oligomer
gguuaagaacagaugcugagg

SEQ ID NO: 2494 - RNA, 21 nt, artificial
  Oligomer
uuaagaacagaugcugaggcu

SEQ ID NO: 2495 - RNA, 21 nt, artificial
  Oligomer
guuugacugagguacagcugg

SEQ ID NO: 2496 - RNA, 21 nt, artificial
  Oligomer
guaaaucugcaaaccaacgga

SEQ ID NO: 2497 - RNA, 21 nt, artificial
  Oligomer
aaaccaacggaaggacuggau

SEQ ID NO: 2498 - RNA, 21 nt, artificial
  Oligomer
uuuccagucauccaacagggu

SEQ ID NO: 2499 - RNA, 21 nt, artificial
  Oligomer
cagucauccaacaggguguug

SEQ ID NO: 2500 - RNA, 21 nt, artificial
  Oligomer
uuccaaaaggaccaucaauau

SEQ ID NO: 2501 - RNA, 21 nt, artificial
  Oligomer
acagcuugggauaauuucuag

SEQ ID NO: 2502 - RNA, 21 nt, artificial
  Oligomer
gaaugaagggcagaauuucgg

SEQ ID NO: 2503 - RNA, 21 nt, artificial
  Oligomer
caaauguugcuuugguuucag

SEQ ID NO: 2504 - RNA, 21 nt, artificial
  Oligomer
auucggauuuccaugacaucu

SEQ ID NO: 2505 - RNA, 21 nt, artificial
  Oligomer
ugacuggcuuauugcuccgga

SEQ ID NO: 2506 - RNA, 21 nt, artificial
  Oligomer
aauccaaagccaagucugugg

SEQ ID NO: 2507 - RNA, 21 nt, artificial
  Oligomer
aauuagcuuggaaucugggcu

SEQ ID NO: 2508 - RNA, 21 nt, artificial
  Oligomer
gaaagguucaugaaaauguuc

SEQ ID NO: 2509 - RNA, 21 nt, artificial
  Oligomer
guucaugaaaauguucugaga

SEQ ID NO: 2510 - RNA, 21 nt, artificial
  Oligomer
uucugagagcugguucgguua

SEQ ID NO: 2511 - RNA, 21 nt, artificial
  Oligomer
ucuuauugcauauguagaggc

SEQ ID NO: 2512 - RNA, 21 nt, artificial
  Oligomer
cuucacuguaauucacugaga

SEQ ID NO: 2513 - RNA, 21 nt, artificial
  Oligomer
uucacuguaauucacugagaa

SEQ ID NO: 2514 - RNA, 21 nt, artificial
  Oligomer
uaacaccacagguaauaugga

SEQ ID NO: 2515 - RNA, 21 nt, artificial
  Oligomer
uucuccugcuuggaaccuucu

SEQ ID NO: 2516 - RNA, 21 nt, artificial
  Oligomer
agggaguucuugaauccacca

SEQ ID NO: 2517 - RNA, 21 nt, artificial
  Oligomer
uugguuuccagauuaaacaug

SEQ ID NO: 2518 - RNA, 21 nt, artificial
  Oligomer
ucaguuuaugaagagucuugg

SEQ ID NO: 2519 - RNA, 21 nt, artificial
  Oligomer
aacaaaaguuuccaccgagga

SEQ ID NO: 2520 - RNA, 21 nt, artificial
  Oligomer
gagguuaagaacagaugcuga

SEQ ID NO: 2521 - RNA, 21 nt, artificial
  Oligomer
cuuguuaugcaacauacagag

SEQ ID NO: 2522 - RNA, 21 nt, artificial
  Oligomer
aguaaaucugcaaaccaacgg

SEQ ID NO: 2523 - RNA, 21 nt, artificial
  Oligomer
guuuccagucauccaacaggg

SEQ ID NO: 2524 - RNA, 21 nt, artificial
  Oligomer
aacaggcagagguguuuaacc

SEQ ID NO: 2525 - RNA, 21 nt, artificial
  Oligomer
ugaugcaaauggaguuacucc

SEQ ID NO: 2526 - RNA, 21 nt, artificial
  Oligomer
auggaguuacuccaaugccuc

SEQ ID NO: 2527 - RNA, 21 nt, artificial
  Oligomer
gaccucauaguucagugauuc

SEQ ID NO: 2528 - RNA, 21 nt, artificial
  Oligomer
auacagcuugggauaauuucu

SEQ ID NO: 2529 - RNA, 21 nt, artificial
  Oligomer
gaagggcagaauuucggaguc

SEQ ID NO: 2530 - RNA, 21 nt, artificial
  Oligomer
ucuaaugcagauacacuggga

SEQ ID NO: 2531 - RNA, 21 nt, artificial
  Oligomer
uguagaguaauauacugacca

SEQ ID NO: 2532 - RNA, 21 nt, artificial
  Oligomer
guagaguaauauacugaccag

SEQ ID NO: 2533 - RNA, 21 nt, artificial
  Oligomer
auccaaagccaagucugugga

SEQ ID NO: 2534 - RNA, 21 nt, artificial
  Oligomer
ugaaaauccuucagggaaagg

SEQ ID NO: 2535 - RNA, 21 nt, artificial
  Oligomer
aggguggguaucuaaauuagu

SEQ ID NO: 2536 - RNA, 21 nt, artificial
  Oligomer
guuugauacuucagcagcccu

SEQ ID NO: 2537 - RNA, 21 nt, artificial
  Oligomer
auugcauauguagaggcugug

SEQ ID NO: 2538 - RNA, 21 nt, artificial
  Oligomer
agaaguuuucuaggauccuca

SEQ ID NO: 2539 - RNA, 21 nt, artificial
  Oligomer
cucaucucgguaucuugcugc

SEQ ID NO: 2540 - RNA, 21 nt, artificial
  Oligomer
uaucuugcugcauucaguuca

SEQ ID NO: 2541 - RNA, 21 nt, artificial
  Oligomer
accacagguaauauggaaugu

SEQ ID NO: 2542 - RNA, 21 nt, artificial
  Oligomer
caccaugaaaaucaacagugu

SEQ ID NO: 2543 - RNA, 21 nt, artificial
  Oligomer
ucuuuggcauaacacagcuga

SEQ ID NO: 2544 - RNA, 21 nt, artificial
  Oligomer
acaacagaaaacaccaacugu

SEQ ID NO: 2545 - RNA, 21 nt, artificial
  Oligomer
aacagaaaacaccaacuguuu

SEQ ID NO: 2546 - RNA, 21 nt, artificial
  Oligomer
aggacguccuauaaacagucu

SEQ ID NO: 2547 - RNA, 21 nt, artificial
  Oligomer
auagucaggucuguucucuug

SEQ ID NO: 2548 - RNA, 21 nt, artificial
  Oligomer
uaugguuuccagucauccaac

SEQ ID NO: 2549 - RNA, 21 nt, artificial
  Oligomer
augcaaauggaguuacuccaa

SEQ ID NO: 2550 - RNA, 21 nt, artificial
  Oligomer
gauuccucaaauggacuucca

SEQ ID NO: 2551 - RNA, 21 nt, artificial
  Oligomer
auggacuuccaaaaggaccau

SEQ ID NO: 2552 - RNA, 21 nt, artificial
  Oligomer
acaggcagagguguuuaaccc

SEQ ID NO: 2553 - RNA, 21 nt, artificial
  Oligomer
guugcuuugguuucaguugga

SEQ ID NO: 2554 - RNA, 21 nt, artificial
  Oligomer
agauacacugggacaauguag

SEQ ID NO: 2555 - RNA, 21 nt, artificial
  Oligomer
cuuaugaccgaaaugauggug

SEQ ID NO: 2556 - RNA, 21 nt, artificial
  Oligomer
auugcuccggauauaccugua

SEQ ID NO: 2557 - RNA, 21 nt, artificial
  Oligomer
uaccuguaaagucuuucggca

SEQ ID NO: 2558 - RNA, 21 nt, artificial
  Oligomer
caaaucuucacaaauuugugc

SEQ ID NO: 2559 - RNA, 21 nt, artificial
  Oligomer
auacagcaagaagguuuucca

SEQ ID NO: 2560 - RNA, 21 nt, artificial
  Oligomer
aaaauccuucagggaaagguu

SEQ ID NO: 2561 - RNA, 21 nt, artificial
  Oligomer
uccugaaacaugcaacgucag

SEQ ID NO: 2562 - RNA, 21 nt, artificial
  Oligomer
gaagagguuaugaguauacca

SEQ ID NO: 2563 - RNA, 21 nt, artificial
  Oligomer
agagaaguuuucuaggauccu

SEQ ID NO: 2564 - RNA, 21 nt, artificial
  Oligomer
ucaucucgguaucuugcugca

SEQ ID NO: 2565 - RNA, 21 nt, artificial
  Oligomer
aucuugcugcauucaguucaa

SEQ ID NO: 2566 - RNA, 21 nt, artificial
  Oligomer
auucauggagagccagaugaa

SEQ ID NO: 2567 - RNA, 21 nt, artificial
  Oligomer
acaaucagccuuagauugagc

SEQ ID NO: 2568 - RNA, 21 nt, artificial
  Oligomer
acuagggaguucuugaaucca

SEQ ID NO: 2569 - RNA, 21 nt, artificial
  Oligomer
aacagugugcaucuaacaguu

SEQ ID NO: 2570 - RNA, 21 nt, artificial
  Oligomer
agaacugaaaagugaaucauc

SEQ ID NO: 2571 - RNA, 21 nt, artificial
  Oligomer
ugaaaagugaaucaucacauc

SEQ ID NO: 2572 - RNA, 21 nt, artificial
  Oligomer
aaugugacggucaucuugcca

SEQ ID NO: 2573 - RNA, 21 nt, artificial
  Oligomer
acggucaucuugccacauucu

SEQ ID NO: 2574 - RNA, 21 nt, artificial
  Oligomer
acacagcugauugauuccgcu

SEQ ID NO: 2575 - RNA, 21 nt, artificial
  Oligomer
uuuucagcugaaagacucuuu

SEQ ID NO: 2576 - RNA, 21 nt, artificial
  Oligomer
uuucagcugaaagacucuuua

SEQ ID NO: 2577 - RNA, 21 nt, artificial
  Oligomer
uacucaguuuaugaagagucu

SEQ ID NO: 2578 - RNA, 21 nt, artificial
  Oligomer
gaaaacaccaacuguuuuucc

SEQ ID NO: 2579 - RNA, 21 nt, artificial
  Oligomer
gaggacguccuauaaacaguc

SEQ ID NO: 2580 - RNA, 21 nt, artificial
  Oligomer
cuggauguugacauagucagg

SEQ ID NO: 2581 - RNA, 21 nt, artificial
  Oligomer
ugacauagucaggucuguucu

SEQ ID NO: 2582 - RNA, 21 nt, artificial
  Oligomer
uugccaaaacuuguuaugcaa

SEQ ID NO: 2583 - RNA, 21 nt, artificial
  Oligomer
acagaguaaaucugcaaacca

SEQ ID NO: 2584 - RNA, 21 nt, artificial
  Oligomer
ucugcaaaccaacggaaggac

SEQ ID NO: 2585 - RNA, 21 nt, artificial
  Oligomer
cucauaguucagugauuccuc

SEQ ID NO: 2586 - RNA, 21 nt, artificial
  Oligomer
aguaauauacugaccaggucu

SEQ ID NO: 2587 - RNA, 21 nt, artificial
  Oligomer
uauugcuccggauauaccugu

SEQ ID NO: 2588 - RNA, 21 nt, artificial
  Oligomer
caguacaggcacaaaggucca

SEQ ID NO: 2589 - RNA, 21 nt, artificial
  Oligomer
uugaaaauccuucagggaaag

SEQ ID NO: 2590 - RNA, 21 nt, artificial
  Oligomer
aaggaaauauucugagagcug

SEQ ID NO: 2591 - RNA, 21 nt, artificial
  Oligomer
aauauucugagagcugguucg

SEQ ID NO: 2592 - RNA, 21 nt, artificial
  Oligomer
agaagagguuaugaguauacc

SEQ ID NO: 2593 - RNA, 21 nt, artificial
  Oligomer
cucuuauugcauauguagagg

SEQ ID NO: 2594 - RNA, 21 nt, artificial
  Oligomer
uucuaggauccucaucucggu

SEQ ID NO: 2595 - RNA, 21 nt, artificial
  Oligomer
aggauccucaucucgguaucu

SEQ ID NO: 2596 - RNA, 21 nt, artificial
  Oligomer
guucuccugcuuggaaccuuc

SEQ ID NO: 2597 - RNA, 21 nt, artificial
  Oligomer
agugugcaucuaacaguuuuc

SEQ ID NO: 2598 - RNA, 21 nt, artificial
  Oligomer
aacugaaaagugaaucaucac

SEQ ID NO: 2599 - RNA, 21 nt, artificial
  Oligomer
gauuaaacauguaaugugacg

SEQ ID NO: 2600 - RNA, 21 nt, artificial
  Oligomer
uaaugugacggucaucuugcc

SEQ ID NO: 2601 - RNA, 21 nt, artificial
  Oligomer
cacagcugauugauuccgcug

SEQ ID NO: 2602 - RNA, 21 nt, artificial
  Oligomer
augaguuguucugguuacuca

SEQ ID NO: 2603 - RNA, 21 nt, artificial
  Oligomer
ugaguuguucugguuacucag

SEQ ID NO: 2604 - RNA, 21 nt, artificial
  Oligomer
ucuguuugacugagguacagc

SEQ ID NO: 2605 - RNA, 21 nt, artificial
  Oligomer
gauguugacauagucaggucu

SEQ ID NO: 2606 - RNA, 21 nt, artificial
  Oligomer
uugacauagucaggucuguuc

SEQ ID NO: 2607 - RNA, 21 nt, artificial
  Oligomer
agucaggucuguucucuugcc

SEQ ID NO: 2608 - RNA, 21 nt, artificial
  Oligomer
uuccagucauccaacagggug

SEQ ID NO: 2609 - RNA, 21 nt, artificial
  Oligomer
aaagacugaguggaagcccga

SEQ ID NO: 2610 - RNA, 21 nt, artificial
  Oligomer
gaggcugaccucauaguucag

SEQ ID NO: 2611 - RNA, 21 nt, artificial
  Oligomer
uucagugauuccucaaaugga

SEQ ID NO: 2612 - RNA, 21 nt, artificial
  Oligomer
acaguacaggcacaaaggucc

SEQ ID NO: 2613 - RNA, 21 nt, artificial
  Oligomer
ggcacaaagguccagaaaucc

SEQ ID NO: 2614 - RNA, 21 nt, artificial
  Oligomer
ucuucacaaauuugugcuggg

SEQ ID NO: 2615 - RNA, 21 nt, artificial
  Oligomer
ucgguuaagacugaugcagcc

SEQ ID NO: 2616 - RNA, 21 nt, artificial
  Oligomer
gaauagcaccaccaccaugca

SEQ ID NO: 2617 - RNA, 21 nt, artificial
  Oligomer
gauccucaucucgguaucuug

SEQ ID NO: 2618 - RNA, 21 nt, artificial
  Oligomer
uccaacaaucuccugguucuc

SEQ ID NO: 2619 - RNA, 21 nt, artificial
  Oligomer
caaucagccuuagauugagca

SEQ ID NO: 2620 - RNA, 21 nt, artificial
  Oligomer
acagugugcaucuaacaguuu

SEQ ID NO: 2621 - RNA, 21 nt, artificial
  Oligomer
guaaugugacggucaucuugc

SEQ ID NO: 2622 - RNA, 21 nt, artificial
  Oligomer
gauuccgcugaguuucaaagu

SEQ ID NO: 2623 - RNA, 21 nt, artificial
  Oligomer
uuagaguccugcuucauggca

SEQ ID NO: 2624 - RNA, 21 nt, artificial
  Oligomer
ucauggcaaaaguuuucagcu

SEQ ID NO: 2625 - RNA, 21 nt, artificial
  Oligomer
uuacucaguuuaugaagaguc

SEQ ID NO: 2626 - RNA, 21 nt, artificial
  Oligomer
aucccaucuguuugacugagg

SEQ ID NO: 2627 - RNA, 21 nt, artificial
  Oligomer
agcuggauguugacauaguca

SEQ ID NO: 2628 - RNA, 21 nt, artificial
  Oligomer
gucaggucuguucucuugcca

SEQ ID NO: 2629 - RNA, 21 nt, artificial
  Oligomer
uggaguuacuccaaugccucc

SEQ ID NO: 2630 - RNA, 21 nt, artificial
  Oligomer
ucauaguucagugauuccuca

SEQ ID NO: 2631 - RNA, 21 nt, artificial
  Oligomer
aauuuucuuugaccauucgga

SEQ ID NO: 2632 - RNA, 21 nt, artificial
  Oligomer
auuuccaugacaucugaggga

SEQ ID NO: 2633 - RNA, 21 nt, artificial
  Oligomer
uuccaugacaucugagggaug

SEQ ID NO: 2634 - RNA, 21 nt, artificial
  Oligomer
accgaaaugauggugacuggc

SEQ ID NO: 2635 - RNA, 21 nt, artificial
  Oligomer
guuuugaaaauccuucaggga

SEQ ID NO: 2636 - RNA, 21 nt, artificial
  Oligomer
aagguucaugaaaauguucug

SEQ ID NO: 2637 - RNA, 21 nt, artificial
  Oligomer
agguucaugaaaauguucuga

SEQ ID NO: 2638 - RNA, 21 nt, artificial
  Oligomer
uauucugagagcugguucggu

SEQ ID NO: 2639 - RNA, 21 nt, artificial
  Oligomer
uugauacuucagcagcccucc

SEQ ID NO: 2640 - RNA, 21 nt, artificial
  Oligomer
caggacauucauggagagcca

SEQ ID NO: 2641 - RNA, 21 nt, artificial
  Oligomer
aggacauucauggagagccag

SEQ ID NO: 2642 - RNA, 21 nt, artificial
  Oligomer
uugagaacugaaaagugaauc

SEQ ID NO: 2643 - RNA, 21 nt, artificial
  Oligomer
ugagaacugaaaagugaauca

SEQ ID NO: 2644 - RNA, 21 nt, artificial
  Oligomer
aaguuuucagcugaaagacuc

SEQ ID NO: 2645 - RNA, 21 nt, artificial
  Oligomer
gacguccuauaaacagucuug

SEQ ID NO: 2646 - RNA, 21 nt, artificial
  Oligomer
aucuguuugacugagguacag

SEQ ID NO: 2647 - RNA, 21 nt, artificial
  Oligomer
cagcuggauguugacauaguc

SEQ ID NO: 2648 - RNA, 21 nt, artificial
  Oligomer
aagaacagaugcugaggcucu

SEQ ID NO: 2649 - RNA, 21 nt, artificial
  Oligomer
ucggauuuccaugacaucuga

SEQ ID NO: 2650 - RNA, 21 nt, artificial
  Oligomer
uugcuccggauauaccuguaa

SEQ ID NO: 2651 - RNA, 21 nt, artificial
  Oligomer
ucugguaaggaaauauucuga

SEQ ID NO: 2652 - RNA, 21 nt, artificial
  Oligomer
aaaguuuucagcugaaagacu

SEQ ID NO: 2653 - RNA, 21 nt, artificial
  Oligomer
uuugacugagguacagcugga

SEQ ID NO: 2654 - RNA, 21 nt, artificial
  Oligomer
ugaaugaagggcagaauuucg

SEQ ID NO: 2655 - RNA, 21 nt, artificial
  Oligomer
uuuccaugacaucugagggau

SEQ ID NO: 2656 - RNA, 21 nt, artificial
  Oligomer
cuucacaaauuugugcugggu

SEQ ID NO: 2657 - RNA, 21 nt, artificial
  Oligomer
cugguaaggaaauauucugag

SEQ ID NO: 2658 - RNA, 21 nt, artificial
  Oligomer
uuuuccagaaaagcaggacau

SEQ ID NO: 2659 - RNA, 21 nt, artificial
  Oligomer
gugugcaucuaacaguuuucu

SEQ ID NO: 2660 - RNA, 21 nt, artificial
  Oligomer
cugguuacucaguuuaugaag

SEQ ID NO: 2661 - RNA, 21 nt, artificial
  Oligomer
ugguuuccagucauccaacag

SEQ ID NO: 2662 - RNA, 21 nt, artificial
  Oligomer
auacuucagcagcccuccuga

SEQ ID NO: 2663 - RNA, 21 nt, artificial
  Oligomer
uccugcuuggaaccuucugug

SEQ ID NO: 2664 - RNA, 21 nt, artificial
  Oligomer
cuuugaccauucggauuucca

SEQ ID NO: 2665 - RNA, 21 nt, artificial
  Oligomer
acucugguaaggaaauauucu

SEQ ID NO: 2666 - RNA, 21 nt, artificial
  Oligomer
ugguaaggaaauauucugaga

SEQ ID NO: 2667 - RNA, 21 nt, artificial
  Oligomer
agaaaacaccaacuguuuuuc

SEQ ID NO: 2668 - RNA, 21 nt, artificial
  Oligomer
gucaaagacugaguggaagcc

SEQ ID NO: 2669 - RNA, 21 nt, artificial
  Oligomer
gcuucauggcaaaaguuuuca

SEQ ID NO: 2670 - RNA, 21 nt, artificial
  Oligomer
aaaacaccaacuguuuuuccu

SEQ ID NO: 2671 - RNA, 21 nt, artificial
  Oligomer
agucuugaauucagugcauga

SEQ ID NO: 2672 - RNA, 21 nt, artificial
  Oligomer
agguccagaaauccaaagcca

SEQ ID NO: 2673 - RNA, 21 nt, artificial
  Oligomer
uuccagaaaagcaggacauuc

SEQ ID NO: 2674 - RNA, 21 nt, artificial
  Oligomer
uggaaccuucugugauccucg

SEQ ID NO: 2675 - RNA, 21 nt, artificial
  Oligomer
aagucuguggaaaauuagcuu

SEQ ID NO: 2676 - RNA, 21 nt, artificial
  Oligomer
gaaccuucugugauccucgga

SEQ ID NO: 2677 - RNA, 21 nt, artificial
  Oligomer
gcuuggaaccuucugugaucc

SEQ ID NO: 2678 - RNA, 21 nt, artificial
  Oligomer
cuuggaaccuucugugauccu

SEQ ID NO: 2679 - RNA, 19 nt, artificial
  Oligomer
cucucugcuugaauuuuaa

SEQ ID NO: 2680 - RNA, 19 nt, artificial
  Oligomer
ggaguuauuuugaagucuu

SEQ ID NO: 2681 - RNA, 19 nt, artificial
  Oligomer
ggcugaauguuuuccuguu

SEQ ID NO: 2682 - RNA, 19 nt, artificial
  Oligomer
gcaaaguggguuuucuaaa

SEQ ID NO: 2683 - RNA, 19 nt, artificial
  Oligomer
gcagaccacaaccucaaaa

SEQ ID NO: 2684 - RNA, 19 nt, artificial
  Oligomer
ggacagaaaaucucauaag

SEQ ID NO: 2685 - RNA, 19 nt, artificial
  Oligomer
ccggaggaguuauuuugaa

SEQ ID NO: 2686 - RNA, 19 nt, artificial
  Oligomer
acauguuuacugucacuuu

SEQ ID NO: 2687 - RNA, 19 nt, artificial
  Oligomer
guagggugacuuuuuaaau

SEQ ID NO: 2688 - RNA, 19 nt, artificial
  Oligomer
ccaggugauuuuaucaauu

SEQ ID NO: 2689 - RNA, 19 nt, artificial
  Oligomer
cacuuuaggauaagaaugu

SEQ ID NO: 2690 - RNA, 19 nt, artificial
  Oligomer
gucacuuuaggauaagaau

SEQ ID NO: 2691 - RNA, 19 nt, artificial
  Oligomer
agucacuuuaggauaagaa

SEQ ID NO: 2692 - RNA, 19 nt, artificial
  Oligomer
agguucaauucuacuucaa

SEQ ID NO: 2693 - RNA, 19 nt, artificial
  Oligomer
ggcauccuuuuacuuugac

SEQ ID NO: 2694 - RNA, 19 nt, artificial
  Oligomer
gcagagucuuuugagaugu

SEQ ID NO: 2695 - RNA, 19 nt, artificial
  Oligomer
cuccagccuaucucaugau

SEQ ID NO: 2696 - RNA, 19 nt, artificial
  Oligomer
cagucacuuuaggauaaga

SEQ ID NO: 2697 - RNA, 19 nt, artificial
  Oligomer
caaaguggguuuucuaaac

SEQ ID NO: 2698 - RNA, 19 nt, artificial
  Oligomer
cggucauucuuuauaucug

SEQ ID NO: 2699 - RNA, 19 nt, artificial
  Oligomer
cggcauugguggaauuguc

SEQ ID NO: 2700 - RNA, 19 nt, artificial
  Oligomer
ccaccuuuuuaucuucuau

SEQ ID NO: 2701 - RNA, 19 nt, artificial
  Oligomer
ggaggaguuauuuugaagu

SEQ ID NO: 2702 - RNA, 19 nt, artificial
  Oligomer
caguggaguaugugacauu

SEQ ID NO: 2703 - RNA, 19 nt, artificial
  Oligomer
acaccuguuuaacuuugac

SEQ ID NO: 2704 - RNA, 19 nt, artificial
  Oligomer
cacaccuguuuaacuuuga

SEQ ID NO: 2705 - RNA, 19 nt, artificial
  Oligomer
gcuauucacaucauugcac

SEQ ID NO: 2706 - RNA, 19 nt, artificial
  Oligomer
ggaucacaaccucaccuuc

SEQ ID NO: 2707 - RNA, 19 nt, artificial
  Oligomer
ucacuuuugauauggucuu

SEQ ID NO: 2708 - RNA, 19 nt, artificial
  Oligomer
aguagggugacuuuuuaaa

SEQ ID NO: 2709 - RNA, 19 nt, artificial
  Oligomer
cccaggugauuuuaucaau

SEQ ID NO: 2710 - RNA, 19 nt, artificial
  Oligomer
gcauuaaacuuugacaagg

SEQ ID NO: 2711 - RNA, 19 nt, artificial
  Oligomer
aaguggguuuucuaaacua

SEQ ID NO: 2712 - RNA, 19 nt, artificial
  Oligomer
cuccauucauauccgagca

SEQ ID NO: 2713 - RNA, 19 nt, artificial
  Oligomer
agauuucuucuccauucau

SEQ ID NO: 2714 - RNA, 19 nt, artificial
  Oligomer
uggcauccuuuuacuuuga

SEQ ID NO: 2715 - RNA, 19 nt, artificial
  Oligomer
ucaaucucucuccuggaau

SEQ ID NO: 2716 - RNA, 19 nt, artificial
  Oligomer
caagugugcagagucuuuu

SEQ ID NO: 2717 - RNA, 19 nt, artificial
  Oligomer
acaguggaguaugugacau

SEQ ID NO: 2718 - RNA, 19 nt, artificial
  Oligomer
ccagccuaucucaugauga

SEQ ID NO: 2719 - RNA, 19 nt, artificial
  Oligomer
cuauucacaucauugcaca

SEQ ID NO: 2720 - RNA, 19 nt, artificial
  Oligomer
uacagcuauucacaucauu

SEQ ID NO: 2721 - RNA, 19 nt, artificial
  Oligomer
cacuuuugauauggucuua

SEQ ID NO: 2722 - RNA, 19 nt, artificial
  Oligomer
ccugaguuuugguuuguaa

SEQ ID NO: 2723 - RNA, 19 nt, artificial
  Oligomer
aggauaagaaugugccucu

SEQ ID NO: 2724 - RNA, 19 nt, artificial
  Oligomer
ugagcagucacuuuaggau

SEQ ID NO: 2725 - RNA, 19 nt, artificial
  Oligomer
ggaguuuucuuauguggcc

SEQ ID NO: 2726 - RNA, 19 nt, artificial
  Oligomer
ccacaaccucaaaacaaaa

SEQ ID NO: 2727 - RNA, 19 nt, artificial
  Oligomer
accacaaccucaaaacaaa

SEQ ID NO: 2728 - RNA, 19 nt, artificial
  Oligomer
agaauccggauugcugaau

SEQ ID NO: 2729 - RNA, 19 nt, artificial
  Oligomer
ccuuuuacuuugaccucug

SEQ ID NO: 2730 - RNA, 19 nt, artificial
  Oligomer
ugauuaccaagguuguuau

SEQ ID NO: 2731 - RNA, 19 nt, artificial
  Oligomer
ccggucauucuuuauaucu

SEQ ID NO: 2732 - RNA, 19 nt, artificial
  Oligomer
accggucauucuuuauauc

SEQ ID NO: 2733 - RNA, 19 nt, artificial
  Oligomer
cggaggaguuauuuugaag

SEQ ID NO: 2734 - RNA, 19 nt, artificial
  Oligomer
caauagccuugauucucau

SEQ ID NO: 2735 - RNA, 19 nt, artificial
  Oligomer
cuguuuaacuuugacugcu

SEQ ID NO: 2736 - RNA, 19 nt, artificial
  Oligomer
caccuguuuaacuuugacu

SEQ ID NO: 2737 - RNA, 19 nt, artificial
  Oligomer
ugaauuuuaacagcacgcu

SEQ ID NO: 2738 - RNA, 19 nt, artificial
  Oligomer
ccgacaaauacuacuacac

SEQ ID NO: 2739 - RNA, 19 nt, artificial
  Oligomer
ccuuccugaaauaugagaa

SEQ ID NO: 2740 - RNA, 19 nt, artificial
  Oligomer
gccuuccugaaauaugaga

SEQ ID NO: 2741 - RNA, 19 nt, artificial
  Oligomer
cuguaaaucuuucuggaca

SEQ ID NO: 2742 - RNA, 19 nt, artificial
  Oligomer
ugcauucaacuucguuacu

SEQ ID NO: 2743 - RNA, 19 nt, artificial
  Oligomer
gcauuuugucucuuuguau

SEQ ID NO: 2744 - RNA, 19 nt, artificial
  Oligomer
guagugggaguuuucuuau

SEQ ID NO: 2745 - RNA, 19 nt, artificial
  Oligomer
ccaagucuguagugggagu

SEQ ID NO: 2746 - RNA, 19 nt, artificial
  Oligomer
ccggaugggacagcaauau

SEQ ID NO: 2747 - RNA, 19 nt, artificial
  Oligomer
aaaguggguuuucuaaacu

SEQ ID NO: 2748 - RNA, 19 nt, artificial
  Oligomer
acaaauuccagugugcaga

SEQ ID NO: 2749 - RNA, 19 nt, artificial
  Oligomer
gguacaaauuccagugugc

SEQ ID NO: 2750 - RNA, 19 nt, artificial
  Oligomer
cuucuaucuugaaauccau

SEQ ID NO: 2751 - RNA, 19 nt, artificial
  Oligomer
gcauccuuuuacuuugacc

SEQ ID NO: 2752 - RNA, 19 nt, artificial
  Oligomer
cagagucuuuugagaugug

SEQ ID NO: 2753 - RNA, 19 nt, artificial
  Oligomer
gaguuauuuugaagucuuc

SEQ ID NO: 2754 - RNA, 19 nt, artificial
  Oligomer
gaggaguuauuuugaaguc

SEQ ID NO: 2755 - RNA, 19 nt, artificial
  Oligomer
cgacaguggaguaugugac

SEQ ID NO: 2756 - RNA, 19 nt, artificial
  Oligomer
uccagccuaucucaugaug

SEQ ID NO: 2757 - RNA, 19 nt, artificial
  Oligomer
accuguuuaacuuugacug

SEQ ID NO: 2758 - RNA, 19 nt, artificial
  Oligomer
ugcacaccuguuuaacuuu

SEQ ID NO: 2759 - RNA, 19 nt, artificial
  Oligomer
acaucauugcacaccuguu

SEQ ID NO: 2760 - RNA, 19 nt, artificial
  Oligomer
gccuauaugaucugccuac

SEQ ID NO: 2761 - RNA, 19 nt, artificial
  Oligomer
ggccgacaaauacuacuac

SEQ ID NO: 2762 - RNA, 19 nt, artificial
  Oligomer
ugaauguuuuccuguuugu

SEQ ID NO: 2763 - RNA, 19 nt, artificial
  Oligomer
cugaauguuuuccuguuug

SEQ ID NO: 2764 - RNA, 19 nt, artificial
  Oligomer
caguuuuguuucugguugu

SEQ ID NO: 2765 - RNA, 19 nt, artificial
  Oligomer
uguuuacugucacuuuuga

SEQ ID NO: 2766 - RNA, 19 nt, artificial
  Oligomer
caacuuaagaacuucugaa

SEQ ID NO: 2767 - RNA, 19 nt, artificial
  Oligomer
caacuucguuacuugagcu

SEQ ID NO: 2768 - RNA, 19 nt, artificial
  Oligomer
ugauugcauucaacuucgu

SEQ ID NO: 2769 - RNA, 19 nt, artificial
  Oligomer
ucccugguauucuuuuuuu

SEQ ID NO: 2770 - RNA, 19 nt, artificial
  Oligomer
ugcauuuugucucuuugua

SEQ ID NO: 2771 - RNA, 19 nt, artificial
  Oligomer
gugggaguuuucuuaugug

SEQ ID NO: 2772 - RNA, 19 nt, artificial
  Oligomer
agucuguagugggaguuuu

SEQ ID NO: 2773 - RNA, 19 nt, artificial
  Oligomer
caagucuguagugggaguu

SEQ ID NO: 2774 - RNA, 19 nt, artificial
  Oligomer
ggacaaugaguuuucuaca

SEQ ID NO: 2775 - RNA, 19 nt, artificial
  Oligomer
cagcaauauuguuggucau

SEQ ID NO: 2776 - RNA, 19 nt, artificial
  Oligomer
cacaaccucaaaacaaaaa

SEQ ID NO: 2777 - RNA, 19 nt, artificial
  Oligomer
gaccacaaccucaaaacaa

SEQ ID NO: 2778 - RNA, 19 nt, artificial
  Oligomer
cuaucuugaaauccaucug

SEQ ID NO: 2779 - RNA, 19 nt, artificial
  Oligomer
cccuuugcuucuaucuuga

SEQ ID NO: 2780 - RNA, 19 nt, artificial
  Oligomer
uccuuuuacuuugaccucu

SEQ ID NO: 2781 - RNA, 19 nt, artificial
  Oligomer
gucauucuuuauaucugug

SEQ ID NO: 2782 - RNA, 19 nt, artificial
  Oligomer
agagcaugaaugagaguca

SEQ ID NO: 2783 - RNA, 19 nt, artificial
  Oligomer
gcuuagggauucacggcau

SEQ ID NO: 2784 - RNA, 19 nt, artificial
  Oligomer
accaccuuuuuaucuucua

SEQ ID NO: 2785 - RNA, 19 nt, artificial
  Oligomer
aggaguuauuuugaagucu

SEQ ID NO: 2786 - RNA, 19 nt, artificial
  Oligomer
ugauucucaugguaacuuc

SEQ ID NO: 2787 - RNA, 19 nt, artificial
  Oligomer
cuggagugaucaugacaau

SEQ ID NO: 2788 - RNA, 19 nt, artificial
  Oligomer
ggguagguguguguuuuuc

SEQ ID NO: 2789 - RNA, 19 nt, artificial
  Oligomer
ccuacauacagcuauucac

SEQ ID NO: 2790 - RNA, 19 nt, artificial
  Oligomer
ugaaauaugagaaggccga

SEQ ID NO: 2791 - RNA, 19 nt, artificial
  Oligomer
gaaggcggaauaaacuuau

SEQ ID NO: 2792 - RNA, 19 nt, artificial
  Oligomer
aguuuuguuucugguuguu

SEQ ID NO: 2793 - RNA, 19 nt, artificial
  Oligomer
cugucacuuuugauauggu

SEQ ID NO: 2794 - RNA, 19 nt, artificial
  Oligomer
cccauauaacaccaacagu

SEQ ID NO: 2795 - RNA, 19 nt, artificial
  Oligomer
acaacuaaucccaggugau

SEQ ID NO: 2796 - RNA, 19 nt, artificial
  Oligomer
cagaguuauacaacuaauc

SEQ ID NO: 2797 - RNA, 19 nt, artificial
  Oligomer
guucagaguuauacaacua

SEQ ID NO: 2798 - RNA, 19 nt, artificial
  Oligomer
gguucagaguuauacaacu

SEQ ID NO: 2799 - RNA, 19 nt, artificial
  Oligomer
gugguucagaguuauacaa

SEQ ID NO: 2800 - RNA, 19 nt, artificial
  Oligomer
ugggaaacugggugguuaa

SEQ ID NO: 2801 - RNA, 19 nt, artificial
  Oligomer
guaauuuacuuggucucgu

SEQ ID NO: 2802 - RNA, 19 nt, artificial
  Oligomer
ucaguaauuuacuuggucu

SEQ ID NO: 2803 - RNA, 19 nt, artificial
  Oligomer
aggacgguaaucugcauuu

SEQ ID NO: 2804 - RNA, 19 nt, artificial
  Oligomer
agcauuaaacuuugacaag

SEQ ID NO: 2805 - RNA, 19 nt, artificial
  Oligomer
gccuuuuccugguucaaca

SEQ ID NO: 2806 - RNA, 19 nt, artificial
  Oligomer
ccucaaaacaaaaaagauc

SEQ ID NO: 2807 - RNA, 19 nt, artificial
  Oligomer
cagaccacaaccucaaaac

SEQ ID NO: 2808 - RNA, 19 nt, artificial
  Oligomer
agcagaagguugugauuac

SEQ ID NO: 2809 - RNA, 19 nt, artificial
  Oligomer
ugcagagucuuuugagaug

SEQ ID NO: 2810 - RNA, 19 nt, artificial
  Oligomer
ggagagcaugaaugagagu

SEQ ID NO: 2811 - RNA, 19 nt, artificial
  Oligomer
acaucuuaaaggcucacag

SEQ ID NO: 2812 - RNA, 19 nt, artificial
  Oligomer
cuauaugaucugccuacau

SEQ ID NO: 2813 - RNA, 19 nt, artificial
  Oligomer
gaaaaauccuugggucaac

SEQ ID NO: 2814 - RNA, 19 nt, artificial
  Oligomer
aggccgacaaauacuacua

SEQ ID NO: 2815 - RNA, 19 nt, artificial
  Oligomer
gggcugaauguuuuccugu

SEQ ID NO: 2816 - RNA, 19 nt, artificial
  Oligomer
ucccaggugauuuuaucaa

SEQ ID NO: 2817 - RNA, 19 nt, artificial
  Oligomer
uguaaaucuuucuggacag

SEQ ID NO: 2818 - RNA, 19 nt, artificial
  Oligomer
cccugguauucuuuuuuug

SEQ ID NO: 2819 - RNA, 19 nt, artificial
  Oligomer
cucccugguauucuuuuuu

SEQ ID NO: 2820 - RNA, 19 nt, artificial
  Oligomer
gccuugacucccugguauu

SEQ ID NO: 2821 - RNA, 19 nt, artificial
  Oligomer
caguaauuuacuuggucuc

SEQ ID NO: 2822 - RNA, 19 nt, artificial
  Oligomer
cucuuuguaucuucaguaa

SEQ ID NO: 2823 - RNA, 19 nt, artificial
  Oligomer
caccucuugacaaugggaa

SEQ ID NO: 2824 - RNA, 19 nt, artificial
  Oligomer
aagguucaauucuacuuca

SEQ ID NO: 2825 - RNA, 19 nt, artificial
  Oligomer
agugggaguuuucuuaugu

SEQ ID NO: 2826 - RNA, 19 nt, artificial
  Oligomer
uguagugggaguuuucuua

SEQ ID NO: 2827 - RNA, 19 nt, artificial
  Oligomer
cuguagugggaguuuucuu

SEQ ID NO: 2828 - RNA, 19 nt, artificial
  Oligomer
uggucaugcagcauuaaac

SEQ ID NO: 2829 - RNA, 19 nt, artificial
  Oligomer
gguuuucuaaacuaccguc

SEQ ID NO: 2830 - RNA, 19 nt, artificial
  Oligomer
uggaggaauuaggcaaagu

SEQ ID NO: 2831 - RNA, 19 nt, artificial
  Oligomer
ggauugcugaaucuucccu

SEQ ID NO: 2832 - RNA, 19 nt, artificial
  Oligomer
cuuugcuucuaucuugaaa

SEQ ID NO: 2833 - RNA, 19 nt, artificial
  Oligomer
ccuuugcuucuaucuugaa

SEQ ID NO: 2834 - RNA, 19 nt, artificial
  Oligomer
ugcaccggucauucuuuau

SEQ ID NO: 2835 - RNA, 19 nt, artificial
  Oligomer
gugcagagucuuuugagau

SEQ ID NO: 2836 - RNA, 19 nt, artificial
  Oligomer
aggagagcaugaaugagag

SEQ ID NO: 2837 - RNA, 19 nt, artificial
  Oligomer
cucaccaccuuuuuaucuu

SEQ ID NO: 2838 - RNA, 19 nt, artificial
  Oligomer
guauacucaccaccuuuuu

SEQ ID NO: 2839 - RNA, 19 nt, artificial
  Oligomer
cacaucuuaaaggcucaca

SEQ ID NO: 2840 - RNA, 19 nt, artificial
  Oligomer
ucacaucuuaaaggcucac

SEQ ID NO: 2841 - RNA, 19 nt, artificial
  Oligomer
guggaguaugugacauuca

SEQ ID NO: 2842 - RNA, 19 nt, artificial
  Oligomer
ccauucucuccagccuauc

SEQ ID NO: 2843 - RNA, 19 nt, artificial
  Oligomer
ccuauaugaucugccuaca

SEQ ID NO: 2844 - RNA, 19 nt, artificial
  Oligomer
uccugugugucgcaaucug

SEQ ID NO: 2845 - RNA, 19 nt, artificial
  Oligomer
agaaaaauccuugggucaa

SEQ ID NO: 2846 - RNA, 19 nt, artificial
  Oligomer
agggcugaauguuuuccug

SEQ ID NO: 2847 - RNA, 19 nt, artificial
  Oligomer
aaacaaaauuaccgagaac

SEQ ID NO: 2848 - RNA, 19 nt, artificial
  Oligomer
ugguuuguaaucuuuuguc

SEQ ID NO: 2849 - RNA, 19 nt, artificial
  Oligomer
gaguuuugguuuguaaucu

SEQ ID NO: 2850 - RNA, 19 nt, artificial
  Oligomer
caggugauuuuaucaauuc

SEQ ID NO: 2851 - RNA, 19 nt, artificial
  Oligomer
ugaaguucuuaaagcccau

SEQ ID NO: 2852 - RNA, 19 nt, artificial
  Oligomer
gggaaacugggugguuaac

SEQ ID NO: 2853 - RNA, 19 nt, artificial
  Oligomer
gcaacuuaagaacuucuga

SEQ ID NO: 2854 - RNA, 19 nt, artificial
  Oligomer
aacuucguuacuugagcuu

SEQ ID NO: 2855 - RNA, 19 nt, artificial
  Oligomer
cucuugacaaugggaaacu

SEQ ID NO: 2856 - RNA, 19 nt, artificial
  Oligomer
acgguaaucugcauuuugu

SEQ ID NO: 2857 - RNA, 19 nt, artificial
  Oligomer
cucggacuuuggcaaagag

SEQ ID NO: 2858 - RNA, 19 nt, artificial
  Oligomer
caauauuguuggucaugca

SEQ ID NO: 2859 - RNA, 19 nt, artificial
  Oligomer
gcaauauuguuggucaugc

SEQ ID NO: 2860 - RNA, 19 nt, artificial
  Oligomer
acagcaauauuguugguca

SEQ ID NO: 2861 - RNA, 19 nt, artificial
  Oligomer
gaauuaggcaaaguggguu

SEQ ID NO: 2862 - RNA, 19 nt, artificial
  Oligomer
agauggaggaauuaggcaa

SEQ ID NO: 2863 - RNA, 19 nt, artificial
  Oligomer
acaggagauggaggaauua

SEQ ID NO: 2864 - RNA, 19 nt, artificial
  Oligomer
caaccucaaaacaaaaaag

SEQ ID NO: 2865 - RNA, 19 nt, artificial
  Oligomer
ccaggauugaaguggaugg

SEQ ID NO: 2866 - RNA, 19 nt, artificial
  Oligomer
gacagaaaaucucauaagg

SEQ ID NO: 2867 - RNA, 19 nt, artificial
  Oligomer
gaauggcauccuuuuacuu

SEQ ID NO: 2868 - RNA, 19 nt, artificial
  Oligomer
guuuuggaauugcagauga

SEQ ID NO: 2869 - RNA, 19 nt, artificial
  Oligomer
aaguuuuggaauugcagau

SEQ ID NO: 2870 - RNA, 19 nt, artificial
  Oligomer
gucaaacagaggagagcau

SEQ ID NO: 2871 - RNA, 19 nt, artificial
  Oligomer
cuuagggauucacggcauu

SEQ ID NO: 2872 - RNA, 19 nt, artificial
  Oligomer
gaagucuucugguauacuc

SEQ ID NO: 2873 - RNA, 19 nt, artificial
  Oligomer
uuugaagucuucugguaua

SEQ ID NO: 2874 - RNA, 19 nt, artificial
  Oligomer
uugauucucaugguaacuu

SEQ ID NO: 2875 - RNA, 19 nt, artificial
  Oligomer
ucccuugccuccauucucu

SEQ ID NO: 2876 - RNA, 19 nt, artificial
  Oligomer
gagaaagcaauuggaucac

SEQ ID NO: 2877 - RNA, 19 nt, artificial
  Oligomer
aaggcggaauaaacuuauu

SEQ ID NO: 2878 - RNA, 19 nt, artificial
  Oligomer
cugaguuuugguuuguaau

SEQ ID NO: 2879 - RNA, 19 nt, artificial
  Oligomer
ggugauuuuaucaauucca

SEQ ID NO: 2880 - RNA, 19 nt, artificial
  Oligomer
cugaaguucuuaaaguucu

SEQ ID NO: 2881 - RNA, 19 nt, artificial
  Oligomer
aucugcauuuugucucuuu

SEQ ID NO: 2882 - RNA, 19 nt, artificial
  Oligomer
gaaacagaaaaccuccuuu

SEQ ID NO: 2883 - RNA, 19 nt, artificial
  Oligomer
uguuggucaugcagcauua

SEQ ID NO: 2884 - RNA, 19 nt, artificial
  Oligomer
gcugaaucuucccuguugc

SEQ ID NO: 2885 - RNA, 19 nt, artificial
  Oligomer
acaaccuguugacuucccu

SEQ ID NO: 2886 - RNA, 19 nt, artificial
  Oligomer
ccuuuuccugguucaacaa

SEQ ID NO: 2887 - RNA, 19 nt, artificial
  Oligomer
ggugccuuuuccugguuca

SEQ ID NO: 2888 - RNA, 19 nt, artificial
  Oligomer
ugcagaccacaaccucaaa

SEQ ID NO: 2889 - RNA, 19 nt, artificial
  Oligomer
ggcuuucgaacaacaauau

SEQ ID NO: 2890 - RNA, 19 nt, artificial
  Oligomer
gggacuggacagaaaaucu

SEQ ID NO: 2891 - RNA, 19 nt, artificial
  Oligomer
ggacaaauguuccauuccu

SEQ ID NO: 2892 - RNA, 19 nt, artificial
  Oligomer
caccaccuuuuuaucuucu

SEQ ID NO: 2893 - RNA, 19 nt, artificial
  Oligomer
ucaccaccuuuuuaucuuc

SEQ ID NO: 2894 - RNA, 19 nt, artificial
  Oligomer
auacucaccaccuuuuuau

SEQ ID NO: 2895 - RNA, 19 nt, artificial
  Oligomer
cuccauucucuccagccua

SEQ ID NO: 2896 - RNA, 19 nt, artificial
  Oligomer
cacugagaaagcaauugga

SEQ ID NO: 2897 - RNA, 19 nt, artificial
  Oligomer
ugguuagggcugaauguuu

SEQ ID NO: 2898 - RNA, 19 nt, artificial
  Oligomer
gguuuguaaucuuuugucc

SEQ ID NO: 2899 - RNA, 19 nt, artificial
  Oligomer
ugaguuuugguuuguaauc

SEQ ID NO: 2900 - RNA, 19 nt, artificial
  Oligomer
ucaauuccaguguuaccau

SEQ ID NO: 2901 - RNA, 19 nt, artificial
  Oligomer
cuucugaaguucuuaaagu

SEQ ID NO: 2902 - RNA, 19 nt, artificial
  Oligomer
agcaacuuaagaacuucug

SEQ ID NO: 2903 - RNA, 19 nt, artificial
  Oligomer
cuucguuacuugagcuuca

SEQ ID NO: 2904 - RNA, 19 nt, artificial
  Oligomer
cuucaguaauuuacuuggu

SEQ ID NO: 2905 - RNA, 19 nt, artificial
  Oligomer
caguaauugaguuauagga

SEQ ID NO: 2906 - RNA, 19 nt, artificial
  Oligomer
ccucuugacaaugggaaac

SEQ ID NO: 2907 - RNA, 19 nt, artificial
  Oligomer
cgguaaucugcauuuuguc

SEQ ID NO: 2908 - RNA, 19 nt, artificial
  Oligomer
auaggaauaaggacgguaa

SEQ ID NO: 2909 - RNA, 19 nt, artificial
  Oligomer
ugaguuauaggaauaagga

SEQ ID NO: 2910 - RNA, 19 nt, artificial
  Oligomer
ggaauuaggcaaagugggu

SEQ ID NO: 2911 - RNA, 19 nt, artificial
  Oligomer
caggauugaaguggauggu

SEQ ID NO: 2912 - RNA, 19 nt, artificial
  Oligomer
gggcuuucgaacaacaaua

SEQ ID NO: 2913 - RNA, 19 nt, artificial
  Oligomer
cagaugaacaagcguggcu

SEQ ID NO: 2914 - RNA, 19 nt, artificial
  Oligomer
acagaggagagcaugaaug

SEQ ID NO: 2915 - RNA, 19 nt, artificial
  Oligomer
ucuucuauauccuuggcuu

SEQ ID NO: 2916 - RNA, 19 nt, artificial
  Oligomer
uggagugaucaugacaaua

SEQ ID NO: 2917 - RNA, 19 nt, artificial
  Oligomer
acuggagugaucaugacaa

SEQ ID NO: 2918 - RNA, 19 nt, artificial
  Oligomer
cacacugagaaagcaauug

SEQ ID NO: 2919 - RNA, 19 nt, artificial
  Oligomer
gcuuccugugugucgcaau

SEQ ID NO: 2920 - RNA, 19 nt, artificial
  Oligomer
uguuugguuagggcugaau

SEQ ID NO: 2921 - RNA, 19 nt, artificial
  Oligomer
guguuaccaucuccugagu

SEQ ID NO: 2922 - RNA, 19 nt, artificial
  Oligomer
caauuccaguguuaccauc

SEQ ID NO: 2923 - RNA, 19 nt, artificial
  Oligomer
gugauuuuaucaauuccag

SEQ ID NO: 2924 - RNA, 19 nt, artificial
  Oligomer
cagcaacuuaagaacuucu

SEQ ID NO: 2925 - RNA, 19 nt, artificial
  Oligomer
acucccugguauucuuuuu

SEQ ID NO: 2926 - RNA, 19 nt, artificial
  Oligomer
agguuugagcagucacuuu

SEQ ID NO: 2927 - RNA, 19 nt, artificial
  Oligomer
cugcauuuugucucuuugu

SEQ ID NO: 2928 - RNA, 19 nt, artificial
  Oligomer
guaaucugcauuuugucuc

SEQ ID NO: 2929 - RNA, 19 nt, artificial
  Oligomer
accucuugacaaugggaaa

SEQ ID NO: 2930 - RNA, 19 nt, artificial
  Oligomer
uuguuggucaugcagcauu

SEQ ID NO: 2931 - RNA, 19 nt, artificial
  Oligomer
ggcaaaguggguuuucuaa

SEQ ID NO: 2932 - RNA, 19 nt, artificial
  Oligomer
gugccuuuuccugguucaa

SEQ ID NO: 2933 - RNA, 19 nt, artificial
  Oligomer
ccugagucuuggaagugga

SEQ ID NO: 2934 - RNA, 19 nt, artificial
  Oligomer
cuacugaguucauccggag

SEQ ID NO: 2935 - RNA, 19 nt, artificial
  Oligomer
gcuacugaguucauccgga

SEQ ID NO: 2936 - RNA, 19 nt, artificial
  Oligomer
ccuaucucaugaugagaaa

SEQ ID NO: 2937 - RNA, 19 nt, artificial
  Oligomer
ugguggccuauaugaucug

SEQ ID NO: 2938 - RNA, 19 nt, artificial
  Oligomer
cugguggccuauaugaucu

SEQ ID NO: 2939 - RNA, 19 nt, artificial
  Oligomer
acaaccucaccuuccacaa

SEQ ID NO: 2940 - RNA, 19 nt, artificial
  Oligomer
uuguuugguuagggcugaa

SEQ ID NO: 2941 - RNA, 19 nt, artificial
  Oligomer
agaaggaaggcggaauaaa

SEQ ID NO: 2942 - RNA, 19 nt, artificial
  Oligomer
uggugguucagaguuauac

SEQ ID NO: 2943 - RNA, 19 nt, artificial
  Oligomer
gguuuggugguucagaguu

SEQ ID NO: 2944 - RNA, 19 nt, artificial
  Oligomer
gagguuuggugguucagag

SEQ ID NO: 2945 - RNA, 19 nt, artificial
  Oligomer
cagagaaggaaggcggaau

SEQ ID NO: 2946 - RNA, 19 nt, artificial
  Oligomer
agcccauggauccuuucuc

SEQ ID NO: 2947 - RNA, 19 nt, artificial
  Oligomer
gaaguucuuaaagcccaug

SEQ ID NO: 2948 - RNA, 19 nt, artificial
  Oligomer
ucagcaacuuaagaacuuc

SEQ ID NO: 2949 - RNA, 19 nt, artificial
  Oligomer
ugacucccugguauucuuu

SEQ ID NO: 2950 - RNA, 19 nt, artificial
  Oligomer
uugacucccugguauucuu

SEQ ID NO: 2951 - RNA, 19 nt, artificial
  Oligomer
ucagguuugagcagucacu

SEQ ID NO: 2952 - RNA, 19 nt, artificial
  Oligomer
cgucagguuugagcaguca

SEQ ID NO: 2953 - RNA, 19 nt, artificial
  Oligomer
ucgucagguuugagcaguc

SEQ ID NO: 2954 - RNA, 19 nt, artificial
  Oligomer
cucgucagguuugagcagu

SEQ ID NO: 2955 - RNA, 19 nt, artificial
  Oligomer
uacuuggucucgucagguu

SEQ ID NO: 2956 - RNA, 19 nt, artificial
  Oligomer
ucucuuuguaucuucagua

SEQ ID NO: 2957 - RNA, 19 nt, artificial
  Oligomer
ucugcauuuugucucuuug

SEQ ID NO: 2958 - RNA, 19 nt, artificial
  Oligomer
gacgguaaucugcauuuug

SEQ ID NO: 2959 - RNA, 19 nt, artificial
  Oligomer
gggacagcaauauuguugg

SEQ ID NO: 2960 - RNA, 19 nt, artificial
  Oligomer
gaaaaucucauaagggcuu

SEQ ID NO: 2961 - RNA, 19 nt, artificial
  Oligomer
uuguuaugcacccauccaa

SEQ ID NO: 2962 - RNA, 19 nt, artificial
  Oligomer
ccagcagaagguugugauu

SEQ ID NO: 2963 - RNA, 19 nt, artificial
  Oligomer
cugagucuuggaaguggau

SEQ ID NO: 2964 - RNA, 19 nt, artificial
  Oligomer
cugcucucugcuugaauuu

SEQ ID NO: 2965 - RNA, 19 nt, artificial
  Oligomer
gcggaauaaacuuauucau

SEQ ID NO: 2966 - RNA, 19 nt, artificial
  Oligomer
agcagagguuuggugguuc

SEQ ID NO: 2967 - RNA, 19 nt, artificial
  Oligomer
ugauagcagagguuuggug

SEQ ID NO: 2968 - RNA, 19 nt, artificial
  Oligomer
cccauggauccuuucucag

SEQ ID NO: 2969 - RNA, 19 nt, artificial
  Oligomer
cugaaguucuuaaagccca

SEQ ID NO: 2970 - RNA, 19 nt, artificial
  Oligomer
uucagcaacuuaagaacuu

SEQ ID NO: 2971 - RNA, 19 nt, artificial
  Oligomer
gacucccugguauucuuuu

SEQ ID NO: 2972 - RNA, 19 nt, artificial
  Oligomer
cagguuugagcagucacuu

SEQ ID NO: 2973 - RNA, 19 nt, artificial
  Oligomer
gucucuuuguaucuucagu

SEQ ID NO: 2974 - RNA, 19 nt, artificial
  Oligomer
gacagcaauauuguugguc

SEQ ID NO: 2975 - RNA, 19 nt, artificial
  Oligomer
ugggacagcaauauuguug

SEQ ID NO: 2976 - RNA, 19 nt, artificial
  Oligomer
agaugugggaugaucguga

SEQ ID NO: 2977 - RNA, 19 nt, artificial
  Oligomer
gcaauuggaucacaaccuc

SEQ ID NO: 2978 - RNA, 19 nt, artificial
  Oligomer
cuacuacacaagaaaaauc

SEQ ID NO: 2979 - RNA, 19 nt, artificial
  Oligomer
uccagugugaacagcaauu

SEQ ID NO: 2980 - RNA, 19 nt, artificial
  Oligomer
gguuuucaguuuuguuucu

SEQ ID NO: 2981 - RNA, 19 nt, artificial
  Oligomer
cuaaguagggugacuuuuu

SEQ ID NO: 2982 - RNA, 19 nt, artificial
  Oligomer
uccaguguuaccaucuccu

SEQ ID NO: 2983 - RNA, 19 nt, artificial
  Oligomer
ccugguauucuuuuuuuga

SEQ ID NO: 2984 - RNA, 19 nt, artificial
  Oligomer
gcagcauuaaacuuugaca

SEQ ID NO: 2985 - RNA, 19 nt, artificial
  Oligomer
gcuggacaaauguuccauu

SEQ ID NO: 2986 - RNA, 19 nt, artificial
  Oligomer
ugauccugcuuccugugug

SEQ ID NO: 2987 - RNA, 19 nt, artificial
  Oligomer
ccacagaagauuuccuaag

SEQ ID NO: 2988 - RNA, 19 nt, artificial
  Oligomer
gggugguuaaccacugguu

SEQ ID NO: 2989 - RNA, 19 nt, artificial
  Oligomer
gcuucagcaacuuaagaac

SEQ ID NO: 2990 - RNA, 19 nt, artificial
  Oligomer
gaguuuucuacaauagcua

SEQ ID NO: 2991 - RNA, 19 nt, artificial
  Oligomer
ugaguuuucuacaauagcu

SEQ ID NO: 2992 - RNA, 19 nt, artificial
  Oligomer
gggacaaugaguuuucuac

SEQ ID NO: 2993 - RNA, 19 nt, artificial
  Oligomer
aggcaaaguggguuuucua

SEQ ID NO: 2994 - RNA, 19 nt, artificial
  Oligomer
gaacaggagauggaggaau

SEQ ID NO: 2995 - RNA, 19 nt, artificial
  Oligomer
ccauuccugaaggaccucu

SEQ ID NO: 2996 - RNA, 19 nt, artificial
  Oligomer
gacaaauguuccauuccug

SEQ ID NO: 2997 - RNA, 19 nt, artificial
  Oligomer
gccuaucucaugaugagaa

SEQ ID NO: 2998 - RNA, 19 nt, artificial
  Oligomer
gucugcucucugcuugaau

SEQ ID NO: 2999 - RNA, 19 nt, artificial
  Oligomer
ccacugguuuucaguuuug

SEQ ID NO: 3000 - RNA, 19 nt, artificial
  Oligomer
acuguagcaaggcuugaua

SEQ ID NO: 3001 - RNA, 19 nt, artificial
  Oligomer
ucaugcagcauuaaacuuu

SEQ ID NO: 3002 - RNA, 19 nt, artificial
  Oligomer
aaaaucucauaagggcuuu

SEQ ID NO: 3003 - RNA, 19 nt, artificial
  Oligomer
ccauccaaaguuuuggaau

SEQ ID NO: 3004 - RNA, 19 nt, artificial
  Oligomer
cccuaaguuugaagggcau

SEQ ID NO: 3005 - RNA, 19 nt, artificial
  Oligomer
agccuugauucucauggua

SEQ ID NO: 3006 - RNA, 19 nt, artificial
  Oligomer
caccaacaguguacauguu

SEQ ID NO: 3007 - RNA, 19 nt, artificial
  Oligomer
cggaugggacagcaauauu

SEQ ID NO: 3008 - RNA, 19 nt, artificial
  Oligomer
ggaacaggagauggaggaa

SEQ ID NO: 3009 - RNA, 19 nt, artificial
  Oligomer
ccaucugguacaaauucca

SEQ ID NO: 3010 - RNA, 19 nt, artificial
  Oligomer
cuaucucaugaugagaaaa

SEQ ID NO: 3011 - RNA, 19 nt, artificial
  Oligomer
cugccuacauacagcuauu

SEQ ID NO: 3012 - RNA, 19 nt, artificial
  Oligomer
uggaucacaaccucaccuu

SEQ ID NO: 3013 - RNA, 19 nt, artificial
  Oligomer
ugcucucugcuugaauuuu

SEQ ID NO: 3014 - RNA, 19 nt, artificial
  Oligomer
uuccuaaguagggugacuu

SEQ ID NO: 3015 - RNA, 19 nt, artificial
  Oligomer
accacugguuuucaguuuu

SEQ ID NO: 3016 - RNA, 19 nt, artificial
  Oligomer
ggauccuuucucagaaaaa

SEQ ID NO: 3017 - RNA, 19 nt, artificial
  Oligomer
ugggacaaugaguuuucua

SEQ ID NO: 3018 - RNA, 19 nt, artificial
  Oligomer
gugggacaaugaguuuucu

SEQ ID NO: 3019 - RNA, 19 nt, artificial
  Oligomer
ccugguucaacaaccuguu

SEQ ID NO: 3020 - RNA, 19 nt, artificial
  Oligomer
ccucuccagaauccggauu

SEQ ID NO: 3021 - RNA, 19 nt, artificial
  Oligomer
cauccaaaguuuuggaauu

SEQ ID NO: 3022 - RNA, 19 nt, artificial
  Oligomer
cugguauacucaccaccuu

SEQ ID NO: 3023 - RNA, 19 nt, artificial
  Oligomer
uaaguagggugacuuuuua

SEQ ID NO: 3024 - RNA, 19 nt, artificial
  Oligomer
ggauaagaaugugccucuc

SEQ ID NO: 3025 - RNA, 19 nt, artificial
  Oligomer
ccagucuggauccuagaaa

SEQ ID NO: 3026 - RNA, 19 nt, artificial
  Oligomer
cgauauuccagucuggauc

SEQ ID NO: 3027 - RNA, 19 nt, artificial
  Oligomer
gagaccaaugugggacaau

SEQ ID NO: 3028 - RNA, 19 nt, artificial
  Oligomer
cagcauuaaacuuugacaa

SEQ ID NO: 3029 - RNA, 19 nt, artificial
  Oligomer
ggaagauuucuucuccauu

SEQ ID NO: 3030 - RNA, 19 nt, artificial
  Oligomer
aggaagauuucuucuccau

SEQ ID NO: 3031 - RNA, 19 nt, artificial
  Oligomer
ccaaaguuuuggaauugca

SEQ ID NO: 3032 - RNA, 19 nt, artificial
  Oligomer
caaauguuccauuccugaa

SEQ ID NO: 3033 - RNA, 19 nt, artificial
  Oligomer
cgcuggacaaauguuccau

SEQ ID NO: 3034 - RNA, 19 nt, artificial
  Oligomer
uguguguuuuucacaucuu

SEQ ID NO: 3035 - RNA, 19 nt, artificial
  Oligomer
ggaugccuuccugaaauau

SEQ ID NO: 3036 - RNA, 19 nt, artificial
  Oligomer
uguuucugguuguuugguu

SEQ ID NO: 3037 - RNA, 19 nt, artificial
  Oligomer
ccaacaguguacauguuua

SEQ ID NO: 3038 - RNA, 19 nt, artificial
  Oligomer
uccuaaguagggugacuuu

SEQ ID NO: 3039 - RNA, 19 nt, artificial
  Oligomer
uggauccuuucucagaaaa

SEQ ID NO: 3040 - RNA, 19 nt, artificial
  Oligomer
ugaaguucuuaaaguucug

SEQ ID NO: 3041 - RNA, 19 nt, artificial
  Oligomer
ucaccgauauuccagucug

SEQ ID NO: 3042 - RNA, 19 nt, artificial
  Oligomer
ugcagcauuaaacuuugac

SEQ ID NO: 3043 - RNA, 19 nt, artificial
  Oligomer
ugguacaaauuccagugug

SEQ ID NO: 3044 - RNA, 19 nt, artificial
  Oligomer
cugguacaaauuccagugu

SEQ ID NO: 3045 - RNA, 19 nt, artificial
  Oligomer
cgaacaacaauauucacca

SEQ ID NO: 3046 - RNA, 19 nt, artificial
  Oligomer
acaguucuguccagagaag

SEQ ID NO: 3047 - RNA, 19 nt, artificial
  Oligomer
cccauccaaaguuuuggaa

SEQ ID NO: 3048 - RNA, 19 nt, artificial
  Oligomer
gcccuaaguuugaagggca

SEQ ID NO: 3049 - RNA, 19 nt, artificial
  Oligomer
cgaaacacgacaguggagu

SEQ ID NO: 3050 - RNA, 19 nt, artificial
  Oligomer
ggcuaaaucccauccaguc

SEQ ID NO: 3051 - RNA, 19 nt, artificial
  Oligomer
guguguguuuuucacaucu

SEQ ID NO: 3052 - RNA, 19 nt, artificial
  Oligomer
gguguguguuuuucacauc

SEQ ID NO: 3053 - RNA, 19 nt, artificial
  Oligomer
ucacaucauugcacaccug

SEQ ID NO: 3054 - RNA, 19 nt, artificial
  Oligomer
ucauuuugcagccgcacac

SEQ ID NO: 3055 - RNA, 19 nt, artificial
  Oligomer
ggcaccugcucauuuugca

SEQ ID NO: 3056 - RNA, 19 nt, artificial
  Oligomer
ccuaaguagggugacuuuu

SEQ ID NO: 3057 - RNA, 19 nt, artificial
  Oligomer
aaccacugguuuucaguuu

SEQ ID NO: 3058 - RNA, 19 nt, artificial
  Oligomer
aggcuugauagcagagguu

SEQ ID NO: 3059 - RNA, 19 nt, artificial
  Oligomer
cuagaaagguucaauucua

SEQ ID NO: 3060 - RNA, 19 nt, artificial
  Oligomer
acaggucugaaacagaaaa

SEQ ID NO: 3061 - RNA, 19 nt, artificial
  Oligomer
uucuaaacuaccgucucuu

SEQ ID NO: 3062 - RNA, 19 nt, artificial
  Oligomer
ggguuuucuaaacuaccgu

SEQ ID NO: 3063 - RNA, 19 nt, artificial
  Oligomer
ccuguugacuucccuggaa

SEQ ID NO: 3064 - RNA, 19 nt, artificial
  Oligomer
ugaggauguuuuccaguau

SEQ ID NO: 3065 - RNA, 19 nt, artificial
  Oligomer
cucuccagaauccggauug

SEQ ID NO: 3066 - RNA, 19 nt, artificial
  Oligomer
gcuuucgaacaacaauauu

SEQ ID NO: 3067 - RNA, 19 nt, artificial
  Oligomer
uggacagaaaaucucauaa

SEQ ID NO: 3068 - RNA, 19 nt, artificial
  Oligomer
cuggacagaaaaucucaua

SEQ ID NO: 3069 - RNA, 19 nt, artificial
  Oligomer
uccauucauauccgagcag

SEQ ID NO: 3070 - RNA, 19 nt, artificial
  Oligomer
cuccuggaauggcauccuu

SEQ ID NO: 3071 - RNA, 19 nt, artificial
  Oligomer
gcacaguucuguccagaga

SEQ ID NO: 3072 - RNA, 19 nt, artificial
  Oligomer
gcgcuggacaaauguucca

SEQ ID NO: 3073 - RNA, 19 nt, artificial
  Oligomer
ucauccggaggaguuauuu

SEQ ID NO: 3074 - RNA, 19 nt, artificial
  Oligomer
aaacacgacaguggaguau

SEQ ID NO: 3075 - RNA, 19 nt, artificial
  Oligomer
accucaccuuccacaagcu

SEQ ID NO: 3076 - RNA, 19 nt, artificial
  Oligomer
cuacacaagaaaaauccuu

SEQ ID NO: 3077 - RNA, 19 nt, artificial
  Oligomer
agauuuccuaaguagggug

SEQ ID NO: 3078 - RNA, 19 nt, artificial
  Oligomer
cuccugaguuuugguuugu

SEQ ID NO: 3079 - RNA, 19 nt, artificial
  Oligomer
ugggugguuaaccacuggu

SEQ ID NO: 3080 - RNA, 19 nt, artificial
  Oligomer
gauccuuucucagaaaaau

SEQ ID NO: 3081 - RNA, 19 nt, artificial
  Oligomer
gaaguucuuaaaguucuga

SEQ ID NO: 3082 - RNA, 19 nt, artificial
  Oligomer
ggauccuagaaagguucaa

SEQ ID NO: 3083 - RNA, 19 nt, artificial
  Oligomer
ucuggauccuagaaagguu

SEQ ID NO: 3084 - RNA, 19 nt, artificial
  Oligomer
gucaccgauauuccagucu

SEQ ID NO: 3085 - RNA, 19 nt, artificial
  Oligomer
cgcaaaugcugucaccgau

SEQ ID NO: 3086 - RNA, 19 nt, artificial
  Oligomer
agggcuuucgaacaacaau

SEQ ID NO: 3087 - RNA, 19 nt, artificial
  Oligomer
ccauucauauccgagcagc

SEQ ID NO: 3088 - RNA, 19 nt, artificial
  Oligomer
gaagauuucuucuccauuc

SEQ ID NO: 3089 - RNA, 19 nt, artificial
  Oligomer
cuccagaggaagauuucuu

SEQ ID NO: 3090 - RNA, 19 nt, artificial
  Oligomer
ggaauggcauccuuuuacu

SEQ ID NO: 3091 - RNA, 19 nt, artificial
  Oligomer
uggaauugcagaugaacaa

SEQ ID NO: 3092 - RNA, 19 nt, artificial
  Oligomer
cacaguucuguccagagaa

SEQ ID NO: 3093 - RNA, 19 nt, artificial
  Oligomer
gcacccauccaaaguuuug

SEQ ID NO: 3094 - RNA, 19 nt, artificial
  Oligomer
augcacccauccaaaguuu

SEQ ID NO: 3095 - RNA, 19 nt, artificial
  Oligomer
gguugugauuaccaagguu

SEQ ID NO: 3096 - RNA, 19 nt, artificial
  Oligomer
gugaaaggauccuccgguu

SEQ ID NO: 3097 - RNA, 19 nt, artificial
  Oligomer
cuggacaaauguuccauuc

SEQ ID NO: 3098 - RNA, 19 nt, artificial
  Oligomer
uucauccggaggaguuauu

SEQ ID NO: 3099 - RNA, 19 nt, artificial
  Oligomer
gccuugauucucaugguaa

SEQ ID NO: 3100 - RNA, 19 nt, artificial
  Oligomer
uggucucacuggagugauc

SEQ ID NO: 3101 - RNA, 19 nt, artificial
  Oligomer
guguguuuuucacaucuua

SEQ ID NO: 3102 - RNA, 19 nt, artificial
  Oligomer
cgcacacugagaaagcaau

SEQ ID NO: 3103 - RNA, 19 nt, artificial
  Oligomer
ggcggaauaaacuuauuca

SEQ ID NO: 3104 - RNA, 19 nt, artificial
  Oligomer
uacauguuuacugucacuu

SEQ ID NO: 3105 - RNA, 19 nt, artificial
  Oligomer
ccauauaacaccaacagug

SEQ ID NO: 3106 - RNA, 19 nt, artificial
  Oligomer
cccacagaagauuuccuaa

SEQ ID NO: 3107 - RNA, 19 nt, artificial
  Oligomer
acuaaucccaggugauuuu

SEQ ID NO: 3108 - RNA, 19 nt, artificial
  Oligomer
gacuguagcaaggcuugau

SEQ ID NO: 3109 - RNA, 19 nt, artificial
  Oligomer
auccuagaaagguucaauu

SEQ ID NO: 3110 - RNA, 19 nt, artificial
  Oligomer
cagucuggauccuagaaag

SEQ ID NO: 3111 - RNA, 19 nt, artificial
  Oligomer
gaaucuucccuguugccua

SEQ ID NO: 3112 - RNA, 19 nt, artificial
  Oligomer
ucccaggauugaaguggau

SEQ ID NO: 3113 - RNA, 19 nt, artificial
  Oligomer
ccaauucccaggauugaag

SEQ ID NO: 3114 - RNA, 19 nt, artificial
  Oligomer
ggacuggacagaaaaucuc

SEQ ID NO: 3115 - RNA, 19 nt, artificial
  Oligomer
gaggaagauuucuucucca

SEQ ID NO: 3116 - RNA, 19 nt, artificial
  Oligomer
ccagaggaagauuucuucu

SEQ ID NO: 3117 - RNA, 19 nt, artificial
  Oligomer
cgcaagugugcagagucuu

SEQ ID NO: 3118 - RNA, 19 nt, artificial
  Oligomer
gagcaugaaugagagucau

SEQ ID NO: 3119 - RNA, 19 nt, artificial
  Oligomer
gguauacucaccaccuuuu

SEQ ID NO: 3120 - RNA, 19 nt, artificial
  Oligomer
caugacaauagccuugauu

SEQ ID NO: 3121 - RNA, 19 nt, artificial
  Oligomer
ucaugacaauagccuugau

SEQ ID NO: 3122 - RNA, 19 nt, artificial
  Oligomer
ugaucaugacaauagccuu

SEQ ID NO: 3123 - RNA, 19 nt, artificial
  Oligomer
gucucacuggagugaucau

SEQ ID NO: 3124 - RNA, 19 nt, artificial
  Oligomer
gaguaugugacauucacca

SEQ ID NO: 3125 - RNA, 19 nt, artificial
  Oligomer
cagccuaucucaugaugag

SEQ ID NO: 3126 - RNA, 19 nt, artificial
  Oligomer
agcaauuggaucacaaccu

SEQ ID NO: 3127 - RNA, 19 nt, artificial
  Oligomer
acuuauucauucccaggaa

SEQ ID NO: 3128 - RNA, 19 nt, artificial
  Oligomer
ucaguuuuguuucugguug

SEQ ID NO: 3129 - RNA, 19 nt, artificial
  Oligomer
uccugaguuuugguuugua

SEQ ID NO: 3130 - RNA, 19 nt, artificial
  Oligomer
gaacuucugaaguucuuaa

SEQ ID NO: 3131 - RNA, 19 nt, artificial
  Oligomer
gauccuagaaagguucaau

SEQ ID NO: 3132 - RNA, 19 nt, artificial
  Oligomer
ccgauauuccagucuggau

SEQ ID NO: 3133 - RNA, 19 nt, artificial
  Oligomer
agaccaaugugggacaaug

SEQ ID NO: 3134 - RNA, 19 nt, artificial
  Oligomer
gaauccggauugcugaauc

SEQ ID NO: 3135 - RNA, 19 nt, artificial
  Oligomer
ccaguaugaaguggcugug

SEQ ID NO: 3136 - RNA, 19 nt, artificial
  Oligomer
uucaccaauucccaggauu

SEQ ID NO: 3137 - RNA, 19 nt, artificial
  Oligomer
cagaggaagauuucuucuc

SEQ ID NO: 3138 - RNA, 19 nt, artificial
  Oligomer
cuggaauggcauccuuuua

SEQ ID NO: 3139 - RNA, 19 nt, artificial
  Oligomer
ccuggaauggcauccuuuu

SEQ ID NO: 3140 - RNA, 19 nt, artificial
  Oligomer
ugcacccauccaaaguuuu

SEQ ID NO: 3141 - RNA, 19 nt, artificial
  Oligomer
ugagagucauccucgcaag

SEQ ID NO: 3142 - RNA, 19 nt, artificial
  Oligomer
cucaugguaacuucagcua

SEQ ID NO: 3143 - RNA, 19 nt, artificial
  Oligomer
agguguguguuuuucacau

SEQ ID NO: 3144 - RNA, 19 nt, artificial
  Oligomer
gccuacauacagcuauuca

SEQ ID NO: 3145 - RNA, 19 nt, artificial
  Oligomer
ggccuauaugaucugccua

SEQ ID NO: 3146 - RNA, 19 nt, artificial
  Oligomer
ucaccuuccacaagcuggu

SEQ ID NO: 3147 - RNA, 19 nt, artificial
  Oligomer
ugcucauuuugcagccgca

SEQ ID NO: 3148 - RNA, 19 nt, artificial
  Oligomer
gcaccugcucauuuugcag

SEQ ID NO: 3149 - RNA, 19 nt, artificial
  Oligomer
ugggucaacauuggccugu

SEQ ID NO: 3150 - RNA, 19 nt, artificial
  Oligomer
acaguguacauguuuacug

SEQ ID NO: 3151 - RNA, 19 nt, artificial
  Oligomer
caucuccugaguuuugguu

SEQ ID NO: 3152 - RNA, 19 nt, artificial
  Oligomer
cuaaucccaggugauuuua

SEQ ID NO: 3153 - RNA, 19 nt, artificial
  Oligomer
ccaugacuguagcaaggcu

SEQ ID NO: 3154 - RNA, 19 nt, artificial
  Oligomer
uggacagccaugacuguag

SEQ ID NO: 3155 - RNA, 19 nt, artificial
  Oligomer
gaaugugccucucaagccu

SEQ ID NO: 3156 - RNA, 19 nt, artificial
  Oligomer
ccucggacuuuggcaaaga

SEQ ID NO: 3157 - RNA, 19 nt, artificial
  Oligomer
caggucugaaacagaaaac

SEQ ID NO: 3158 - RNA, 19 nt, artificial
  Oligomer
gguucaacaaccuguugac

SEQ ID NO: 3159 - RNA, 19 nt, artificial
  Oligomer
gcugguuggagcaggaauu

SEQ ID NO: 3160 - RNA, 19 nt, artificial
  Oligomer
cugaaggaccucuccagaa

SEQ ID NO: 3161 - RNA, 19 nt, artificial
  Oligomer
agaugaacaagcguggcuu

SEQ ID NO: 3162 - RNA, 19 nt, artificial
  Oligomer
agguugugauuaccaaggu

SEQ ID NO: 3163 - RNA, 19 nt, artificial
  Oligomer
gcagaagguugugauuacc

SEQ ID NO: 3164 - RNA, 19 nt, artificial
  Oligomer
aaaggauccuccgguuuua

SEQ ID NO: 3165 - RNA, 19 nt, artificial
  Oligomer
ucgcaagugugcagagucu

SEQ ID NO: 3166 - RNA, 19 nt, artificial
  Oligomer
ccugcgcuggacaaauguu

SEQ ID NO: 3167 - RNA, 19 nt, artificial
  Oligomer
ccuugauucucaugguaac

SEQ ID NO: 3168 - RNA, 19 nt, artificial
  Oligomer
uggaguaugugacauucac

SEQ ID NO: 3169 - RNA, 19 nt, artificial
  Oligomer
cuauagcagaagccgacag

SEQ ID NO: 3170 - RNA, 19 nt, artificial
  Oligomer
caagaaaaauccuuggguc

SEQ ID NO: 3171 - RNA, 19 nt, artificial
  Oligomer
acaagaaaaauccuugggu

SEQ ID NO: 3172 - RNA, 19 nt, artificial
  Oligomer
uccuguuuguggaugccuu

SEQ ID NO: 3173 - RNA, 19 nt, artificial
  Oligomer
caguguacauguuuacugu

SEQ ID NO: 3174 - RNA, 19 nt, artificial
  Oligomer
caacuaaucccaggugauu

SEQ ID NO: 3175 - RNA, 19 nt, artificial
  Oligomer
ggcuugauagcagagguuu

SEQ ID NO: 3176 - RNA, 19 nt, artificial
  Oligomer
agcaaggcuugauagcaga

SEQ ID NO: 3177 - RNA, 19 nt, artificial
  Oligomer
agccuugacucccugguau

SEQ ID NO: 3178 - RNA, 19 nt, artificial
  Oligomer
gacaggucugaaacagaaa

SEQ ID NO: 3179 - RNA, 19 nt, artificial
  Oligomer
ugacaggucugaaacagaa

SEQ ID NO: 3180 - RNA, 19 nt, artificial
  Oligomer
ucuucccuguugccuagaa

SEQ ID NO: 3181 - RNA, 19 nt, artificial
  Oligomer
gucaugcagcauuaaacuu

SEQ ID NO: 3182 - RNA, 19 nt, artificial
  Oligomer
caggugccuuuuccugguu

SEQ ID NO: 3183 - RNA, 19 nt, artificial
  Oligomer
ccggauugcugaaucuucc

SEQ ID NO: 3184 - RNA, 19 nt, artificial
  Oligomer
gugcagaccacaaccucaa

SEQ ID NO: 3185 - RNA, 19 nt, artificial
  Oligomer
uugcuucuaucuugaaauc

SEQ ID NO: 3186 - RNA, 19 nt, artificial
  Oligomer
ccagaauccggauugcuga

SEQ ID NO: 3187 - RNA, 19 nt, artificial
  Oligomer
gaggauguuuuccaguaug

SEQ ID NO: 3188 - RNA, 19 nt, artificial
  Oligomer
acuggacagaaaaucucau

SEQ ID NO: 3189 - RNA, 19 nt, artificial
  Oligomer
aagauuucuucuccauuca

SEQ ID NO: 3190 - RNA, 19 nt, artificial
  Oligomer
agaggaagauuucuucucc

SEQ ID NO: 3191 - RNA, 19 nt, artificial
  Oligomer
uccagaggaagauuucuuc

SEQ ID NO: 3192 - RNA, 19 nt, artificial
  Oligomer
cucugcuccagaggaagau

SEQ ID NO: 3193 - RNA, 19 nt, artificial
  Oligomer
uccuggaauggcauccuuu

SEQ ID NO: 3194 - RNA, 19 nt, artificial
  Oligomer
ggaauugcagaugaacaag

SEQ ID NO: 3195 - RNA, 19 nt, artificial
  Oligomer
auccaaaguuuuggaauug

SEQ ID NO: 3196 - RNA, 19 nt, artificial
  Oligomer
gauccuugcaccggucauu

SEQ ID NO: 3197 - RNA, 19 nt, artificial
  Oligomer
gagucauccucgcaagugu

SEQ ID NO: 3198 - RNA, 19 nt, artificial
  Oligomer
ucacuggagugaucaugac

SEQ ID NO: 3199 - RNA, 19 nt, artificial
  Oligomer
guagguguguguuuuucac

SEQ ID NO: 3200 - RNA, 19 nt, artificial
  Oligomer
ugccuacauacagcuauuc

SEQ ID NO: 3201 - RNA, 19 nt, artificial
  Oligomer
ccgcacacugagaaagcaa

SEQ ID NO: 3202 - RNA, 19 nt, artificial
  Oligomer
gugguuaaccacugguuuu

SEQ ID NO: 3203 - RNA, 19 nt, artificial
  Oligomer
ggugguuaaccacugguuu

SEQ ID NO: 3204 - RNA, 19 nt, artificial
  Oligomer
gcaaggcuugauagcagag

SEQ ID NO: 3205 - RNA, 19 nt, artificial
  Oligomer
cuuaagaacuucugaaguu

SEQ ID NO: 3206 - RNA, 19 nt, artificial
  Oligomer
cguuacuugagcuucagca

SEQ ID NO: 3207 - RNA, 19 nt, artificial
  Oligomer
gguucaauucuacuucaac

SEQ ID NO: 3208 - RNA, 19 nt, artificial
  Oligomer
ccaaugugggacaaugagu

SEQ ID NO: 3209 - RNA, 19 nt, artificial
  Oligomer
ucaacaaccuguugacuuc

SEQ ID NO: 3210 - RNA, 19 nt, artificial
  Oligomer
ugguucaacaaccuguuga

SEQ ID NO: 3211 - RNA, 19 nt, artificial
  Oligomer
gcugauagcacaguucugu

SEQ ID NO: 3212 - RNA, 19 nt, artificial
  Oligomer
cugcuccagaggaagauuu

SEQ ID NO: 3213 - RNA, 19 nt, artificial
  Oligomer
uccaaaguuuuggaauugc

SEQ ID NO: 3214 - RNA, 19 nt, artificial
  Oligomer
ccaagguuguuaugcaccc

SEQ ID NO: 3215 - RNA, 19 nt, artificial
  Oligomer
gcaugaaugagagucaucc

SEQ ID NO: 3216 - RNA, 19 nt, artificial
  Oligomer
uggccuauaugaucugccu

SEQ ID NO: 3217 - RNA, 19 nt, artificial
  Oligomer
gcuugaauuuuaacagcac

SEQ ID NO: 3218 - RNA, 19 nt, artificial
  Oligomer
ugcuugaauuuuaacagca

SEQ ID NO: 3219 - RNA, 19 nt, artificial
  Oligomer
cucugcuugaauuuuaaca

SEQ ID NO: 3220 - RNA, 19 nt, artificial
  Oligomer
aggcggaauaaacuuauuc

SEQ ID NO: 3221 - RNA, 19 nt, artificial
  Oligomer
cacugguuuucaguuuugu

SEQ ID NO: 3222 - RNA, 19 nt, artificial
  Oligomer
auggauccuuucucagaaa

SEQ ID NO: 3223 - RNA, 19 nt, artificial
  Oligomer
gaaacugggugguuaacca

SEQ ID NO: 3224 - RNA, 19 nt, artificial
  Oligomer
uugagcuucagcaacuuaa

SEQ ID NO: 3225 - RNA, 19 nt, artificial
  Oligomer
ccaccucuugacaauggga

SEQ ID NO: 3226 - RNA, 19 nt, artificial
  Oligomer
cuggauccuagaaagguuc

SEQ ID NO: 3227 - RNA, 19 nt, artificial
  Oligomer
ggacuuuggcaaagagccu

SEQ ID NO: 3228 - RNA, 19 nt, artificial
  Oligomer
ugaaacagaaaaccuccuu

SEQ ID NO: 3229 - RNA, 19 nt, artificial
  Oligomer
cugaaacagaaaaccuccu

SEQ ID NO: 3230 - RNA, 19 nt, artificial
  Oligomer
cuguugacuucccuggaac

SEQ ID NO: 3231 - RNA, 19 nt, artificial
  Oligomer
ccagugaggauguuuucca

SEQ ID NO: 3232 - RNA, 19 nt, artificial
  Oligomer
cagccagugaggauguuuu

SEQ ID NO: 3233 - RNA, 19 nt, artificial
  Oligomer
cacagccagugaggauguu

SEQ ID NO: 3234 - RNA, 19 nt, artificial
  Oligomer
accaauucccaggauugaa

SEQ ID NO: 3235 - RNA, 19 nt, artificial
  Oligomer
uggaauggcauccuuuuac

SEQ ID NO: 3236 - RNA, 19 nt, artificial
  Oligomer
acccauccaaaguuuugga

SEQ ID NO: 3237 - RNA, 19 nt, artificial
  Oligomer
caagguuguuaugcaccca

SEQ ID NO: 3238 - RNA, 19 nt, artificial
  Oligomer
ugguauacucaccaccuuu

SEQ ID NO: 3239 - RNA, 19 nt, artificial
  Oligomer
gugacauucaccagcguug

SEQ ID NO: 3240 - RNA, 19 nt, artificial
  Oligomer
ucugccuacauacagcuau

SEQ ID NO: 3241 - RNA, 19 nt, artificial
  Oligomer
cuuuugauauggucuuauc

SEQ ID NO: 3242 - RNA, 19 nt, artificial
  Oligomer
ugguuaaccacugguuuuc

SEQ ID NO: 3243 - RNA, 19 nt, artificial
  Oligomer
cauggauccuuucucagaa

SEQ ID NO: 3244 - RNA, 19 nt, artificial
  Oligomer
agaacuucugaaguucuua

SEQ ID NO: 3245 - RNA, 19 nt, artificial
  Oligomer
aagaacuucugaaguucuu

SEQ ID NO: 3246 - RNA, 19 nt, artificial
  Oligomer
cuccaaaccaccucuugac

SEQ ID NO: 3247 - RNA, 19 nt, artificial
  Oligomer
ugccuagaagggcuccaaa

SEQ ID NO: 3248 - RNA, 19 nt, artificial
  Oligomer
cgugacaggucugaaacag

SEQ ID NO: 3249 - RNA, 19 nt, artificial
  Oligomer
cugacaucgugacaggucu

SEQ ID NO: 3250 - RNA, 19 nt, artificial
  Oligomer
ugacuucccuggaacagga

SEQ ID NO: 3251 - RNA, 19 nt, artificial
  Oligomer
uccaguaugaaguggcugu

SEQ ID NO: 3252 - RNA, 19 nt, artificial
  Oligomer
cagugaggauguuuuccag

SEQ ID NO: 3253 - RNA, 19 nt, artificial
  Oligomer
agguuguuaugcacccauc

SEQ ID NO: 3254 - RNA, 19 nt, artificial
  Oligomer
aagguuguuaugcacccau

SEQ ID NO: 3255 - RNA, 19 nt, artificial
  Oligomer
cccagcagaagguugugau

SEQ ID NO: 3256 - RNA, 19 nt, artificial
  Oligomer
ccuugcaccggucauucuu

SEQ ID NO: 3257 - RNA, 19 nt, artificial
  Oligomer
gugaucaugacaauagccu

SEQ ID NO: 3258 - RNA, 19 nt, artificial
  Oligomer
cuggucucacuggagugau

SEQ ID NO: 3259 - RNA, 19 nt, artificial
  Oligomer
ugcuuccugugugucgcaa

SEQ ID NO: 3260 - RNA, 19 nt, artificial
  Oligomer
cugcuugaauuuuaacagc

SEQ ID NO: 3261 - RNA, 19 nt, artificial
  Oligomer
ccaucuccugaguuuuggu

SEQ ID NO: 3262 - RNA, 19 nt, artificial
  Oligomer
caugacuguagcaaggcuu

SEQ ID NO: 3263 - RNA, 19 nt, artificial
  Oligomer
acuugagcuucagcaacuu

SEQ ID NO: 3264 - RNA, 19 nt, artificial
  Oligomer
ccuagaaagguucaauucu

SEQ ID NO: 3265 - RNA, 19 nt, artificial
  Oligomer
uccagucuggauccuagaa

SEQ ID NO: 3266 - RNA, 19 nt, artificial
  Oligomer
aggugccuuuuccugguuc

SEQ ID NO: 3267 - RNA, 19 nt, artificial
  Oligomer
acaggugccuuuuccuggu

SEQ ID NO: 3268 - RNA, 19 nt, artificial
  Oligomer
ggauugaaguggauggucc

SEQ ID NO: 3269 - RNA, 19 nt, artificial
  Oligomer
uggaaguggauccuugcac

SEQ ID NO: 3270 - RNA, 19 nt, artificial
  Oligomer
ugacaauagccuugauucu

SEQ ID NO: 3271 - RNA, 19 nt, artificial
  Oligomer
guucuuggcuaaaucccau

SEQ ID NO: 3272 - RNA, 19 nt, artificial
  Oligomer
gucuuauccagugugaaca

SEQ ID NO: 3273 - RNA, 19 nt, artificial
  Oligomer
uggucuuauccagugugaa

SEQ ID NO: 3274 - RNA, 19 nt, artificial
  Oligomer
ccaguguuaccaucuccug

SEQ ID NO: 3275 - RNA, 19 nt, artificial
  Oligomer
agcuucagcaacuuaagaa

SEQ ID NO: 3276 - RNA, 19 nt, artificial
  Oligomer
ccuccuuugggagaccaau

SEQ ID NO: 3277 - RNA, 19 nt, artificial
  Oligomer
acagccagugaggauguuu

SEQ ID NO: 3278 - RNA, 19 nt, artificial
  Oligomer
uccuuggcuuagggauuca

SEQ ID NO: 3279 - RNA, 19 nt, artificial
  Oligomer
cacaagcugguggccuaua

SEQ ID NO: 3280 - RNA, 19 nt, artificial
  Oligomer
accaacaguguacauguuu

SEQ ID NO: 3281 - RNA, 19 nt, artificial
  Oligomer
ugccucucaagccuugacu

SEQ ID NO: 3282 - RNA, 19 nt, artificial
  Oligomer
accuccuuugggagaccaa

SEQ ID NO: 3283 - RNA, 19 nt, artificial
  Oligomer
cagaaaaccuccuuuggga

SEQ ID NO: 3284 - RNA, 19 nt, artificial
  Oligomer
accggaugggacagcaaua

SEQ ID NO: 3285 - RNA, 19 nt, artificial
  Oligomer
ccuuggcuuagggauucac

SEQ ID NO: 3286 - RNA, 19 nt, artificial
  Oligomer
cugguuuucaguuuuguuu

SEQ ID NO: 3287 - RNA, 19 nt, artificial
  Oligomer
caacaguguacauguuuac

SEQ ID NO: 3288 - RNA, 19 nt, artificial
  Oligomer
aggugauuuuaucaauucc

SEQ ID NO: 3289 - RNA, 19 nt, artificial
  Oligomer
uaaagcccauggauccuuu

SEQ ID NO: 3290 - RNA, 19 nt, artificial
  Oligomer
gucugaaacagaaaaccuc

SEQ ID NO: 3291 - RNA, 19 nt, artificial
  Oligomer
gucuuggaaguggauccuu

SEQ ID NO: 3292 - RNA, 19 nt, artificial
  Oligomer
ggauguuuuccaguaugaa

SEQ ID NO: 3293 - RNA, 19 nt, artificial
  Oligomer
uccuuugggagaccaaugu

SEQ ID NO: 3294 - RNA, 19 nt, artificial
  Oligomer
acagccaugacuguagcaa

SEQ ID NO: 3295 - RNA, 19 nt, artificial
  Oligomer
agggagacaggugccuuuu

SEQ ID NO: 3296 - RNA, 19 nt, artificial
  Oligomer
aggauguuuuccaguauga

SEQ ID NO: 3297 - RNA, 19 nt, artificial
  Oligomer
gguaacuucagcuacugag

SEQ ID NO: 3298 - RNA, 19 nt, artificial
  Oligomer
uuaaaauucaagcagagag

SEQ ID NO: 3299 - RNA, 19 nt, artificial
  Oligomer
aagacuucaaaauaacucc

SEQ ID NO: 3300 - RNA, 19 nt, artificial
  Oligomer
aacaggaaaacauucagcc

SEQ ID NO: 3301 - RNA, 19 nt, artificial
  Oligomer
uuuagaaaacccacuuugc

SEQ ID NO: 3302 - RNA, 19 nt, artificial
  Oligomer
uuuugagguuguggucugc

SEQ ID NO: 3303 - RNA, 19 nt, artificial
  Oligomer
cuuaugagauuuucugucc

SEQ ID NO: 3304 - RNA, 19 nt, artificial
  Oligomer
uucaaaauaacuccuccgg

SEQ ID NO: 3305 - RNA, 19 nt, artificial
  Oligomer
aaagugacaguaaacaugu

SEQ ID NO: 3306 - RNA, 19 nt, artificial
  Oligomer
auuuaaaaagucacccuac

SEQ ID NO: 3307 - RNA, 19 nt, artificial
  Oligomer
aauugauaaaaucaccugg

SEQ ID NO: 3308 - RNA, 19 nt, artificial
  Oligomer
acauucuuauccuaaagug

SEQ ID NO: 3309 - RNA, 19 nt, artificial
  Oligomer
auucuuauccuaaagugac

SEQ ID NO: 3310 - RNA, 19 nt, artificial
  Oligomer
uucuuauccuaaagugacu

SEQ ID NO: 3311 - RNA, 19 nt, artificial
  Oligomer
uugaaguagaauugaaccu

SEQ ID NO: 3312 - RNA, 19 nt, artificial
  Oligomer
gucaaaguaaaaggaugcc

SEQ ID NO: 3313 - RNA, 19 nt, artificial
  Oligomer
acaucucaaaagacucugc

SEQ ID NO: 3314 - RNA, 19 nt, artificial
  Oligomer
aucaugagauaggcuggag

SEQ ID NO: 3315 - RNA, 19 nt, artificial
  Oligomer
ucuuauccuaaagugacug

SEQ ID NO: 3316 - RNA, 19 nt, artificial
  Oligomer
guuuagaaaacccacuuug

SEQ ID NO: 3317 - RNA, 19 nt, artificial
  Oligomer
cagauauaaagaaugaccg

SEQ ID NO: 3318 - RNA, 19 nt, artificial
  Oligomer
gacaauuccaccaaugccg

SEQ ID NO: 3319 - RNA, 19 nt, artificial
  Oligomer
auagaagauaaaaaggugg

SEQ ID NO: 3320 - RNA, 19 nt, artificial
  Oligomer
acuucaaaauaacuccucc

SEQ ID NO: 3321 - RNA, 19 nt, artificial
  Oligomer
aaugucacauacuccacug

SEQ ID NO: 3322 - RNA, 19 nt, artificial
  Oligomer
gucaaaguuaaacaggugu

SEQ ID NO: 3323 - RNA, 19 nt, artificial
  Oligomer
ucaaaguuaaacaggugug

SEQ ID NO: 3324 - RNA, 19 nt, artificial
  Oligomer
gugcaaugaugugaauagc

SEQ ID NO: 3325 - RNA, 19 nt, artificial
  Oligomer
gaaggugagguugugaucc

SEQ ID NO: 3326 - RNA, 19 nt, artificial
  Oligomer
aagaccauaucaaaaguga

SEQ ID NO: 3327 - RNA, 19 nt, artificial
  Oligomer
uuuaaaaagucacccuacu

SEQ ID NO: 3328 - RNA, 19 nt, artificial
  Oligomer
auugauaaaaucaccuggg

SEQ ID NO: 3329 - RNA, 19 nt, artificial
  Oligomer
ccuugucaaaguuuaaugc

SEQ ID NO: 3330 - RNA, 19 nt, artificial
  Oligomer
uaguuuagaaaacccacuu

SEQ ID NO: 3331 - RNA, 19 nt, artificial
  Oligomer
ugcucggauaugaauggag

SEQ ID NO: 3332 - RNA, 19 nt, artificial
  Oligomer
augaauggagaagaaaucu

SEQ ID NO: 3333 - RNA, 19 nt, artificial
  Oligomer
ucaaaguaaaaggaugcca

SEQ ID NO: 3334 - RNA, 19 nt, artificial
  Oligomer
auuccaggagagagauuga

SEQ ID NO: 3335 - RNA, 19 nt, artificial
  Oligomer
aaaagacucugcacacuug

SEQ ID NO: 3336 - RNA, 19 nt, artificial
  Oligomer
augucacauacuccacugu

SEQ ID NO: 3337 - RNA, 19 nt, artificial
  Oligomer
ucaucaugagauaggcugg

SEQ ID NO: 3338 - RNA, 19 nt, artificial
  Oligomer
ugugcaaugaugugaauag

SEQ ID NO: 3339 - RNA, 19 nt, artificial
  Oligomer
aaugaugugaauagcugua

SEQ ID NO: 3340 - RNA, 19 nt, artificial
  Oligomer
uaagaccauaucaaaagug

SEQ ID NO: 3341 - RNA, 19 nt, artificial
  Oligomer
uuacaaaccaaaacucagg

SEQ ID NO: 3342 - RNA, 19 nt, artificial
  Oligomer
agaggcacauucuuauccu

SEQ ID NO: 3343 - RNA, 19 nt, artificial
  Oligomer
auccuaaagugacugcuca

SEQ ID NO: 3344 - RNA, 19 nt, artificial
  Oligomer
ggccacauaagaaaacucc

SEQ ID NO: 3345 - RNA, 19 nt, artificial
  Oligomer
uuuuguuuugagguugugg

SEQ ID NO: 3346 - RNA, 19 nt, artificial
  Oligomer
uuuguuuugagguuguggu

SEQ ID NO: 3347 - RNA, 19 nt, artificial
  Oligomer
auucagcaauccggauucu

SEQ ID NO: 3348 - RNA, 19 nt, artificial
  Oligomer
cagaggucaaaguaaaagg

SEQ ID NO: 3349 - RNA, 19 nt, artificial
  Oligomer
auaacaaccuugguaauca

SEQ ID NO: 3350 - RNA, 19 nt, artificial
  Oligomer
agauauaaagaaugaccgg

SEQ ID NO: 3351 - RNA, 19 nt, artificial
  Oligomer
gauauaaagaaugaccggu

SEQ ID NO: 3352 - RNA, 19 nt, artificial
  Oligomer
cuucaaaauaacuccuccg

SEQ ID NO: 3353 - RNA, 19 nt, artificial
  Oligomer
augagaaucaaggcuauug

SEQ ID NO: 3354 - RNA, 19 nt, artificial
  Oligomer
agcagucaaaguuaaacag

SEQ ID NO: 3355 - RNA, 19 nt, artificial
  Oligomer
agucaaaguuaaacaggug

SEQ ID NO: 3356 - RNA, 19 nt, artificial
  Oligomer
agcgugcuguuaaaauuca

SEQ ID NO: 3357 - RNA, 19 nt, artificial
  Oligomer
guguaguaguauuugucgg

SEQ ID NO: 3358 - RNA, 19 nt, artificial
  Oligomer
uucucauauuucaggaagg

SEQ ID NO: 3359 - RNA, 19 nt, artificial
  Oligomer
ucucauauuucaggaaggc

SEQ ID NO: 3360 - RNA, 19 nt, artificial
  Oligomer
uguccagaaagauuuacag

SEQ ID NO: 3361 - RNA, 19 nt, artificial
  Oligomer
aguaacgaaguugaaugca

SEQ ID NO: 3362 - RNA, 19 nt, artificial
  Oligomer
auacaaagagacaaaaugc

SEQ ID NO: 3363 - RNA, 19 nt, artificial
  Oligomer
auaagaaaacucccacuac

SEQ ID NO: 3364 - RNA, 19 nt, artificial
  Oligomer
acucccacuacagacuugg

SEQ ID NO: 3365 - RNA, 19 nt, artificial
  Oligomer
auauugcugucccauccgg

SEQ ID NO: 3366 - RNA, 19 nt, artificial
  Oligomer
aguuuagaaaacccacuuu

SEQ ID NO: 3367 - RNA, 19 nt, artificial
  Oligomer
ucugcacacuggaauuugu

SEQ ID NO: 3368 - RNA, 19 nt, artificial
  Oligomer
gcacacuggaauuuguacc

SEQ ID NO: 3369 - RNA, 19 nt, artificial
  Oligomer
auggauuucaagauagaag

SEQ ID NO: 3370 - RNA, 19 nt, artificial
  Oligomer
ggucaaaguaaaaggaugc

SEQ ID NO: 3371 - RNA, 19 nt, artificial
  Oligomer
cacaucucaaaagacucug

SEQ ID NO: 3372 - RNA, 19 nt, artificial
  Oligomer
gaagacuucaaaauaacuc

SEQ ID NO: 3373 - RNA, 19 nt, artificial
  Oligomer
gacuucaaaauaacuccuc

SEQ ID NO: 3374 - RNA, 19 nt, artificial
  Oligomer
gucacauacuccacugucg

SEQ ID NO: 3375 - RNA, 19 nt, artificial
  Oligomer
caucaugagauaggcugga

SEQ ID NO: 3376 - RNA, 19 nt, artificial
  Oligomer
cagucaaaguuaaacaggu

SEQ ID NO: 3377 - RNA, 19 nt, artificial
  Oligomer
aaaguuaaacaggugugca

SEQ ID NO: 3378 - RNA, 19 nt, artificial
  Oligomer
aacaggugugcaaugaugu

SEQ ID NO: 3379 - RNA, 19 nt, artificial
  Oligomer
guaggcagaucauauaggc

SEQ ID NO: 3380 - RNA, 19 nt, artificial
  Oligomer
guaguaguauuugucggcc

SEQ ID NO: 3381 - RNA, 19 nt, artificial
  Oligomer
acaaacaggaaaacauuca

SEQ ID NO: 3382 - RNA, 19 nt, artificial
  Oligomer
caaacaggaaaacauucag

SEQ ID NO: 3383 - RNA, 19 nt, artificial
  Oligomer
acaaccagaaacaaaacug

SEQ ID NO: 3384 - RNA, 19 nt, artificial
  Oligomer
ucaaaagugacaguaaaca

SEQ ID NO: 3385 - RNA, 19 nt, artificial
  Oligomer
uucagaaguucuuaaguug

SEQ ID NO: 3386 - RNA, 19 nt, artificial
  Oligomer
agcucaaguaacgaaguug

SEQ ID NO: 3387 - RNA, 19 nt, artificial
  Oligomer
acgaaguugaaugcaauca

SEQ ID NO: 3388 - RNA, 19 nt, artificial
  Oligomer
aaaaaaagaauaccaggga

SEQ ID NO: 3389 - RNA, 19 nt, artificial
  Oligomer
uacaaagagacaaaaugca

SEQ ID NO: 3390 - RNA, 19 nt, artificial
  Oligomer
cacauaagaaaacucccac

SEQ ID NO: 3391 - RNA, 19 nt, artificial
  Oligomer
aaaacucccacuacagacu

SEQ ID NO: 3392 - RNA, 19 nt, artificial
  Oligomer
aacucccacuacagacuug

SEQ ID NO: 3393 - RNA, 19 nt, artificial
  Oligomer
uguagaaaacucauugucc

SEQ ID NO: 3394 - RNA, 19 nt, artificial
  Oligomer
augaccaacaauauugcug

SEQ ID NO: 3395 - RNA, 19 nt, artificial
  Oligomer
uuuuuguuuugagguugug

SEQ ID NO: 3396 - RNA, 19 nt, artificial
  Oligomer
uuguuuugagguugugguc

SEQ ID NO: 3397 - RNA, 19 nt, artificial
  Oligomer
cagauggauuucaagauag

SEQ ID NO: 3398 - RNA, 19 nt, artificial
  Oligomer
ucaagauagaagcaaaggg

SEQ ID NO: 3399 - RNA, 19 nt, artificial
  Oligomer
agaggucaaaguaaaagga

SEQ ID NO: 3400 - RNA, 19 nt, artificial
  Oligomer
cacagauauaaagaaugac

SEQ ID NO: 3401 - RNA, 19 nt, artificial
  Oligomer
ugacucucauucaugcucu

SEQ ID NO: 3402 - RNA, 19 nt, artificial
  Oligomer
augccgugaaucccuaagc

SEQ ID NO: 3403 - RNA, 19 nt, artificial
  Oligomer
uagaagauaaaaagguggu

SEQ ID NO: 3404 - RNA, 19 nt, artificial
  Oligomer
agacuucaaaauaacuccu

SEQ ID NO: 3405 - RNA, 19 nt, artificial
  Oligomer
gaaguuaccaugagaauca

SEQ ID NO: 3406 - RNA, 19 nt, artificial
  Oligomer
auugucaugaucacuccag

SEQ ID NO: 3407 - RNA, 19 nt, artificial
  Oligomer
gaaaaacacacaccuaccc

SEQ ID NO: 3408 - RNA, 19 nt, artificial
  Oligomer
gugaauagcuguauguagg

SEQ ID NO: 3409 - RNA, 19 nt, artificial
  Oligomer
ucggccuucucauauuuca

SEQ ID NO: 3410 - RNA, 19 nt, artificial
  Oligomer
auaaguuuauuccgccuuc

SEQ ID NO: 3411 - RNA, 19 nt, artificial
  Oligomer
aacaaccagaaacaaaacu

SEQ ID NO: 3412 - RNA, 19 nt, artificial
  Oligomer
accauaucaaaagugacag

SEQ ID NO: 3413 - RNA, 19 nt, artificial
  Oligomer
acuguugguguuauauggg

SEQ ID NO: 3414 - RNA, 19 nt, artificial
  Oligomer
aucaccugggauuaguugu

SEQ ID NO: 3415 - RNA, 19 nt, artificial
  Oligomer
gauuaguuguauaacucug

SEQ ID NO: 3416 - RNA, 19 nt, artificial
  Oligomer
uaguuguauaacucugaac

SEQ ID NO: 3417 - RNA, 19 nt, artificial
  Oligomer
aguuguauaacucugaacc

SEQ ID NO: 3418 - RNA, 19 nt, artificial
  Oligomer
uuguauaacucugaaccac

SEQ ID NO: 3419 - RNA, 19 nt, artificial
  Oligomer
uuaaccacccaguuuccca

SEQ ID NO: 3420 - RNA, 19 nt, artificial
  Oligomer
acgagaccaaguaaauuac

SEQ ID NO: 3421 - RNA, 19 nt, artificial
  Oligomer
agaccaaguaaauuacuga

SEQ ID NO: 3422 - RNA, 19 nt, artificial
  Oligomer
aaaugcagauuaccguccu

SEQ ID NO: 3423 - RNA, 19 nt, artificial
  Oligomer
cuugucaaaguuuaaugcu

SEQ ID NO: 3424 - RNA, 19 nt, artificial
  Oligomer
uguugaaccaggaaaaggc

SEQ ID NO: 3425 - RNA, 19 nt, artificial
  Oligomer
gaucuuuuuuguuuugagg

SEQ ID NO: 3426 - RNA, 19 nt, artificial
  Oligomer
guuuugagguuguggucug

SEQ ID NO: 3427 - RNA, 19 nt, artificial
  Oligomer
guaaucacaaccuucugcu

SEQ ID NO: 3428 - RNA, 19 nt, artificial
  Oligomer
caucucaaaagacucugca

SEQ ID NO: 3429 - RNA, 19 nt, artificial
  Oligomer
acucucauucaugcucucc

SEQ ID NO: 3430 - RNA, 19 nt, artificial
  Oligomer
cugugagccuuuaagaugu

SEQ ID NO: 3431 - RNA, 19 nt, artificial
  Oligomer
auguaggcagaucauauag

SEQ ID NO: 3432 - RNA, 19 nt, artificial
  Oligomer
guugacccaaggauuuuuc

SEQ ID NO: 3433 - RNA, 19 nt, artificial
  Oligomer
uaguaguauuugucggccu

SEQ ID NO: 3434 - RNA, 19 nt, artificial
  Oligomer
acaggaaaacauucagccc

SEQ ID NO: 3435 - RNA, 19 nt, artificial
  Oligomer
uugauaaaaucaccuggga

SEQ ID NO: 3436 - RNA, 19 nt, artificial
  Oligomer
cuguccagaaagauuuaca

SEQ ID NO: 3437 - RNA, 19 nt, artificial
  Oligomer
caaaaaaagaauaccaggg

SEQ ID NO: 3438 - RNA, 19 nt, artificial
  Oligomer
aaaaaagaauaccagggag

SEQ ID NO: 3439 - RNA, 19 nt, artificial
  Oligomer
aauaccagggagucaaggc

SEQ ID NO: 3440 - RNA, 19 nt, artificial
  Oligomer
gagaccaaguaaauuacug

SEQ ID NO: 3441 - RNA, 19 nt, artificial
  Oligomer
uuacugaagauacaaagag

SEQ ID NO: 3442 - RNA, 19 nt, artificial
  Oligomer
uucccauugucaagaggug

SEQ ID NO: 3443 - RNA, 19 nt, artificial
  Oligomer
ugaaguagaauugaaccuu

SEQ ID NO: 3444 - RNA, 19 nt, artificial
  Oligomer
acauaagaaaacucccacu

SEQ ID NO: 3445 - RNA, 19 nt, artificial
  Oligomer
uaagaaaacucccacuaca

SEQ ID NO: 3446 - RNA, 19 nt, artificial
  Oligomer
aagaaaacucccacuacag

SEQ ID NO: 3447 - RNA, 19 nt, artificial
  Oligomer
guuuaaugcugcaugacca

SEQ ID NO: 3448 - RNA, 19 nt, artificial
  Oligomer
gacgguaguuuagaaaacc

SEQ ID NO: 3449 - RNA, 19 nt, artificial
  Oligomer
acuuugccuaauuccucca

SEQ ID NO: 3450 - RNA, 19 nt, artificial
  Oligomer
agggaagauucagcaaucc

SEQ ID NO: 3451 - RNA, 19 nt, artificial
  Oligomer
uuucaagauagaagcaaag

SEQ ID NO: 3452 - RNA, 19 nt, artificial
  Oligomer
uucaagauagaagcaaagg

SEQ ID NO: 3453 - RNA, 19 nt, artificial
  Oligomer
auaaagaaugaccggugca

SEQ ID NO: 3454 - RNA, 19 nt, artificial
  Oligomer
aucucaaaagacucugcac

SEQ ID NO: 3455 - RNA, 19 nt, artificial
  Oligomer
cucucauucaugcucuccu

SEQ ID NO: 3456 - RNA, 19 nt, artificial
  Oligomer
aagauaaaaagguggugag

SEQ ID NO: 3457 - RNA, 19 nt, artificial
  Oligomer
aaaaagguggugaguauac

SEQ ID NO: 3458 - RNA, 19 nt, artificial
  Oligomer
ugugagccuuuaagaugug

SEQ ID NO: 3459 - RNA, 19 nt, artificial
  Oligomer
gugagccuuuaagauguga

SEQ ID NO: 3460 - RNA, 19 nt, artificial
  Oligomer
ugaaugucacauacuccac

SEQ ID NO: 3461 - RNA, 19 nt, artificial
  Oligomer
gauaggcuggagagaaugg

SEQ ID NO: 3462 - RNA, 19 nt, artificial
  Oligomer
uguaggcagaucauauagg

SEQ ID NO: 3463 - RNA, 19 nt, artificial
  Oligomer
cagauugcgacacacagga

SEQ ID NO: 3464 - RNA, 19 nt, artificial
  Oligomer
uugacccaaggauuuuucu

SEQ ID NO: 3465 - RNA, 19 nt, artificial
  Oligomer
caggaaaacauucagcccu

SEQ ID NO: 3466 - RNA, 19 nt, artificial
  Oligomer
guucucgguaauuuuguuu

SEQ ID NO: 3467 - RNA, 19 nt, artificial
  Oligomer
gacaaaagauuacaaacca

SEQ ID NO: 3468 - RNA, 19 nt, artificial
  Oligomer
agauuacaaaccaaaacuc

SEQ ID NO: 3469 - RNA, 19 nt, artificial
  Oligomer
gaauugauaaaaucaccug

SEQ ID NO: 3470 - RNA, 19 nt, artificial
  Oligomer
augggcuuuaagaacuuca

SEQ ID NO: 3471 - RNA, 19 nt, artificial
  Oligomer
guuaaccacccaguuuccc

SEQ ID NO: 3472 - RNA, 19 nt, artificial
  Oligomer
ucagaaguucuuaaguugc

SEQ ID NO: 3473 - RNA, 19 nt, artificial
  Oligomer
aagcucaaguaacgaaguu

SEQ ID NO: 3474 - RNA, 19 nt, artificial
  Oligomer
aguuucccauugucaagag

SEQ ID NO: 3475 - RNA, 19 nt, artificial
  Oligomer
acaaaaugcagauuaccgu

SEQ ID NO: 3476 - RNA, 19 nt, artificial
  Oligomer
cucuuugccaaaguccgag

SEQ ID NO: 3477 - RNA, 19 nt, artificial
  Oligomer
ugcaugaccaacaauauug

SEQ ID NO: 3478 - RNA, 19 nt, artificial
  Oligomer
gcaugaccaacaauauugc

SEQ ID NO: 3479 - RNA, 19 nt, artificial
  Oligomer
ugaccaacaauauugcugu

SEQ ID NO: 3480 - RNA, 19 nt, artificial
  Oligomer
aacccacuuugccuaauuc

SEQ ID NO: 3481 - RNA, 19 nt, artificial
  Oligomer
uugccuaauuccuccaucu

SEQ ID NO: 3482 - RNA, 19 nt, artificial
  Oligomer
uaauuccuccaucuccugu

SEQ ID NO: 3483 - RNA, 19 nt, artificial
  Oligomer
cuuuuuuguuuugagguug

SEQ ID NO: 3484 - RNA, 19 nt, artificial
  Oligomer
ccauccacuucaauccugg

SEQ ID NO: 3485 - RNA, 19 nt, artificial
  Oligomer
ccuuaugagauuuucuguc

SEQ ID NO: 3486 - RNA, 19 nt, artificial
  Oligomer
aaguaaaaggaugccauuc

SEQ ID NO: 3487 - RNA, 19 nt, artificial
  Oligomer
ucaucugcaauuccaaaac

SEQ ID NO: 3488 - RNA, 19 nt, artificial
  Oligomer
aucugcaauuccaaaacuu

SEQ ID NO: 3489 - RNA, 19 nt, artificial
  Oligomer
augcucuccucuguuugac

SEQ ID NO: 3490 - RNA, 19 nt, artificial
  Oligomer
aaugccgugaaucccuaag

SEQ ID NO: 3491 - RNA, 19 nt, artificial
  Oligomer
gaguauaccagaagacuuc

SEQ ID NO: 3492 - RNA, 19 nt, artificial
  Oligomer
uauaccagaagacuucaaa

SEQ ID NO: 3493 - RNA, 19 nt, artificial
  Oligomer
aaguuaccaugagaaucaa

SEQ ID NO: 3494 - RNA, 19 nt, artificial
  Oligomer
agagaauggaggcaaggga

SEQ ID NO: 3495 - RNA, 19 nt, artificial
  Oligomer
gugauccaauugcuuucuc

SEQ ID NO: 3496 - RNA, 19 nt, artificial
  Oligomer
aauaaguuuauuccgccuu

SEQ ID NO: 3497 - RNA, 19 nt, artificial
  Oligomer
auuacaaaccaaaacucag

SEQ ID NO: 3498 - RNA, 19 nt, artificial
  Oligomer
uggaauugauaaaaucacc

SEQ ID NO: 3499 - RNA, 19 nt, artificial
  Oligomer
agaacuuuaagaacuucag

SEQ ID NO: 3500 - RNA, 19 nt, artificial
  Oligomer
aaagagacaaaaugcagau

SEQ ID NO: 3501 - RNA, 19 nt, artificial
  Oligomer
aaaggagguuuucuguuuc

SEQ ID NO: 3502 - RNA, 19 nt, artificial
  Oligomer
uaaugcugcaugaccaaca

SEQ ID NO: 3503 - RNA, 19 nt, artificial
  Oligomer
gcaacagggaagauucagc

SEQ ID NO: 3504 - RNA, 19 nt, artificial
  Oligomer
agggaagucaacagguugu

SEQ ID NO: 3505 - RNA, 19 nt, artificial
  Oligomer
uuguugaaccaggaaaagg

SEQ ID NO: 3506 - RNA, 19 nt, artificial
  Oligomer
ugaaccaggaaaaggcacc

SEQ ID NO: 3507 - RNA, 19 nt, artificial
  Oligomer
uuugagguuguggucugca

SEQ ID NO: 3508 - RNA, 19 nt, artificial
  Oligomer
auauuguuguucgaaagcc

SEQ ID NO: 3509 - RNA, 19 nt, artificial
  Oligomer
agauuuucuguccaguccc

SEQ ID NO: 3510 - RNA, 19 nt, artificial
  Oligomer
aggaauggaacauuugucc

SEQ ID NO: 3511 - RNA, 19 nt, artificial
  Oligomer
agaagauaaaaagguggug

SEQ ID NO: 3512 - RNA, 19 nt, artificial
  Oligomer
gaagauaaaaaggugguga

SEQ ID NO: 3513 - RNA, 19 nt, artificial
  Oligomer
auaaaaagguggugaguau

SEQ ID NO: 3514 - RNA, 19 nt, artificial
  Oligomer
uaggcuggagagaauggag

SEQ ID NO: 3515 - RNA, 19 nt, artificial
  Oligomer
uccaauugcuuucucagug

SEQ ID NO: 3516 - RNA, 19 nt, artificial
  Oligomer
aaacauucagcccuaacca

SEQ ID NO: 3517 - RNA, 19 nt, artificial
  Oligomer
ggacaaaagauuacaaacc

SEQ ID NO: 3518 - RNA, 19 nt, artificial
  Oligomer
gauuacaaaccaaaacuca

SEQ ID NO: 3519 - RNA, 19 nt, artificial
  Oligomer
augguaacacuggaauuga

SEQ ID NO: 3520 - RNA, 19 nt, artificial
  Oligomer
acuuuaagaacuucagaag

SEQ ID NO: 3521 - RNA, 19 nt, artificial
  Oligomer
cagaaguucuuaaguugcu

SEQ ID NO: 3522 - RNA, 19 nt, artificial
  Oligomer
ugaagcucaaguaacgaag

SEQ ID NO: 3523 - RNA, 19 nt, artificial
  Oligomer
accaaguaaauuacugaag

SEQ ID NO: 3524 - RNA, 19 nt, artificial
  Oligomer
uccuauaacucaauuacug

SEQ ID NO: 3525 - RNA, 19 nt, artificial
  Oligomer
guuucccauugucaagagg

SEQ ID NO: 3526 - RNA, 19 nt, artificial
  Oligomer
gacaaaaugcagauuaccg

SEQ ID NO: 3527 - RNA, 19 nt, artificial
  Oligomer
uuaccguccuuauuccuau

SEQ ID NO: 3528 - RNA, 19 nt, artificial
  Oligomer
uccuuauuccuauaacuca

SEQ ID NO: 3529 - RNA, 19 nt, artificial
  Oligomer
acccacuuugccuaauucc

SEQ ID NO: 3530 - RNA, 19 nt, artificial
  Oligomer
accauccacuucaauccug

SEQ ID NO: 3531 - RNA, 19 nt, artificial
  Oligomer
uauuguuguucgaaagccc

SEQ ID NO: 3532 - RNA, 19 nt, artificial
  Oligomer
agccacgcuuguucaucug

SEQ ID NO: 3533 - RNA, 19 nt, artificial
  Oligomer
cauucaugcucuccucugu

SEQ ID NO: 3534 - RNA, 19 nt, artificial
  Oligomer
aagccaaggauauagaaga

SEQ ID NO: 3535 - RNA, 19 nt, artificial
  Oligomer
uauugucaugaucacucca

SEQ ID NO: 3536 - RNA, 19 nt, artificial
  Oligomer
uugucaugaucacuccagu

SEQ ID NO: 3537 - RNA, 19 nt, artificial
  Oligomer
caauugcuuucucagugug

SEQ ID NO: 3538 - RNA, 19 nt, artificial
  Oligomer
auugcgacacacaggaagc

SEQ ID NO: 3539 - RNA, 19 nt, artificial
  Oligomer
auucagcccuaaccaaaca

SEQ ID NO: 3540 - RNA, 19 nt, artificial
  Oligomer
acucaggagaugguaacac

SEQ ID NO: 3541 - RNA, 19 nt, artificial
  Oligomer
gaugguaacacuggaauug

SEQ ID NO: 3542 - RNA, 19 nt, artificial
  Oligomer
cuggaauugauaaaaucac

SEQ ID NO: 3543 - RNA, 19 nt, artificial
  Oligomer
agaaguucuuaaguugcug

SEQ ID NO: 3544 - RNA, 19 nt, artificial
  Oligomer
aaaaagaauaccagggagu

SEQ ID NO: 3545 - RNA, 19 nt, artificial
  Oligomer
aaagugacugcucaaaccu

SEQ ID NO: 3546 - RNA, 19 nt, artificial
  Oligomer
acaaagagacaaaaugcag

SEQ ID NO: 3547 - RNA, 19 nt, artificial
  Oligomer
gagacaaaaugcagauuac

SEQ ID NO: 3548 - RNA, 19 nt, artificial
  Oligomer
uuucccauugucaagaggu

SEQ ID NO: 3549 - RNA, 19 nt, artificial
  Oligomer
aaugcugcaugaccaacaa

SEQ ID NO: 3550 - RNA, 19 nt, artificial
  Oligomer
uuagaaaacccacuuugcc

SEQ ID NO: 3551 - RNA, 19 nt, artificial
  Oligomer
uugaaccaggaaaaggcac

SEQ ID NO: 3552 - RNA, 19 nt, artificial
  Oligomer
uccacuuccaagacucagg

SEQ ID NO: 3553 - RNA, 19 nt, artificial
  Oligomer
cuccggaugaacucaguag

SEQ ID NO: 3554 - RNA, 19 nt, artificial
  Oligomer
uccggaugaacucaguagc

SEQ ID NO: 3555 - RNA, 19 nt, artificial
  Oligomer
uuucucaucaugagauagg

SEQ ID NO: 3556 - RNA, 19 nt, artificial
  Oligomer
cagaucauauaggccacca

SEQ ID NO: 3557 - RNA, 19 nt, artificial
  Oligomer
agaucauauaggccaccag

SEQ ID NO: 3558 - RNA, 19 nt, artificial
  Oligomer
uuguggaaggugagguugu

SEQ ID NO: 3559 - RNA, 19 nt, artificial
  Oligomer
uucagcccuaaccaaacaa

SEQ ID NO: 3560 - RNA, 19 nt, artificial
  Oligomer
uuuauuccgccuuccuucu

SEQ ID NO: 3561 - RNA, 19 nt, artificial
  Oligomer
guauaacucugaaccacca

SEQ ID NO: 3562 - RNA, 19 nt, artificial
  Oligomer
aacucugaaccaccaaacc

SEQ ID NO: 3563 - RNA, 19 nt, artificial
  Oligomer
cucugaaccaccaaaccuc

SEQ ID NO: 3564 - RNA, 19 nt, artificial
  Oligomer
auuccgccuuccuucucug

SEQ ID NO: 3565 - RNA, 19 nt, artificial
  Oligomer
gagaaaggauccaugggcu

SEQ ID NO: 3566 - RNA, 19 nt, artificial
  Oligomer
caugggcuuuaagaacuuc

SEQ ID NO: 3567 - RNA, 19 nt, artificial
  Oligomer
gaaguucuuaaguugcuga

SEQ ID NO: 3568 - RNA, 19 nt, artificial
  Oligomer
aaagaauaccagggaguca

SEQ ID NO: 3569 - RNA, 19 nt, artificial
  Oligomer
aagaauaccagggagucaa

SEQ ID NO: 3570 - RNA, 19 nt, artificial
  Oligomer
agugacugcucaaaccuga

SEQ ID NO: 3571 - RNA, 19 nt, artificial
  Oligomer
ugacugcucaaaccugacg

SEQ ID NO: 3572 - RNA, 19 nt, artificial
  Oligomer
gacugcucaaaccugacga

SEQ ID NO: 3573 - RNA, 19 nt, artificial
  Oligomer
acugcucaaaccugacgag

SEQ ID NO: 3574 - RNA, 19 nt, artificial
  Oligomer
aaccugacgagaccaagua

SEQ ID NO: 3575 - RNA, 19 nt, artificial
  Oligomer
uacugaagauacaaagaga

SEQ ID NO: 3576 - RNA, 19 nt, artificial
  Oligomer
caaagagacaaaaugcaga

SEQ ID NO: 3577 - RNA, 19 nt, artificial
  Oligomer
caaaaugcagauuaccguc

SEQ ID NO: 3578 - RNA, 19 nt, artificial
  Oligomer
ccaacaauauugcuguccc

SEQ ID NO: 3579 - RNA, 19 nt, artificial
  Oligomer
aagcccuuaugagauuuuc

SEQ ID NO: 3580 - RNA, 19 nt, artificial
  Oligomer
uuggaugggugcauaacaa

SEQ ID NO: 3581 - RNA, 19 nt, artificial
  Oligomer
aaucacaaccuucugcugg

SEQ ID NO: 3582 - RNA, 19 nt, artificial
  Oligomer
auccacuuccaagacucag

SEQ ID NO: 3583 - RNA, 19 nt, artificial
  Oligomer
aaauucaagcagagagcag

SEQ ID NO: 3584 - RNA, 19 nt, artificial
  Oligomer
augaauaaguuuauuccgc

SEQ ID NO: 3585 - RNA, 19 nt, artificial
  Oligomer
gaaccaccaaaccucugcu

SEQ ID NO: 3586 - RNA, 19 nt, artificial
  Oligomer
caccaaaccucugcuauca

SEQ ID NO: 3587 - RNA, 19 nt, artificial
  Oligomer
cugagaaaggauccauggg

SEQ ID NO: 3588 - RNA, 19 nt, artificial
  Oligomer
ugggcuuuaagaacuucag

SEQ ID NO: 3589 - RNA, 19 nt, artificial
  Oligomer
aaguucuuaaguugcugaa

SEQ ID NO: 3590 - RNA, 19 nt, artificial
  Oligomer
aaaagaauaccagggaguc

SEQ ID NO: 3591 - RNA, 19 nt, artificial
  Oligomer
aagugacugcucaaaccug

SEQ ID NO: 3592 - RNA, 19 nt, artificial
  Oligomer
acugaagauacaaagagac

SEQ ID NO: 3593 - RNA, 19 nt, artificial
  Oligomer
gaccaacaauauugcuguc

SEQ ID NO: 3594 - RNA, 19 nt, artificial
  Oligomer
caacaauauugcuguccca

SEQ ID NO: 3595 - RNA, 19 nt, artificial
  Oligomer
ucacgaucaucccacaucu

SEQ ID NO: 3596 - RNA, 19 nt, artificial
  Oligomer
gagguugugauccaauugc

SEQ ID NO: 3597 - RNA, 19 nt, artificial
  Oligomer
gauuuuucuuguguaguag

SEQ ID NO: 3598 - RNA, 19 nt, artificial
  Oligomer
aauugcuguucacacugga

SEQ ID NO: 3599 - RNA, 19 nt, artificial
  Oligomer
agaaacaaaacugaaaacc

SEQ ID NO: 3600 - RNA, 19 nt, artificial
  Oligomer
aaaaagucacccuacuuag

SEQ ID NO: 3601 - RNA, 19 nt, artificial
  Oligomer
aggagaugguaacacugga

SEQ ID NO: 3602 - RNA, 19 nt, artificial
  Oligomer
ucaaaaaaagaauaccagg

SEQ ID NO: 3603 - RNA, 19 nt, artificial
  Oligomer
ugucaaaguuuaaugcugc

SEQ ID NO: 3604 - RNA, 19 nt, artificial
  Oligomer
aauggaacauuuguccagc

SEQ ID NO: 3605 - RNA, 19 nt, artificial
  Oligomer
cacacaggaagcaggauca

SEQ ID NO: 3606 - RNA, 19 nt, artificial
  Oligomer
cuuaggaaaucuucugugg

SEQ ID NO: 3607 - RNA, 19 nt, artificial
  Oligomer
aaccagugguuaaccaccc

SEQ ID NO: 3608 - RNA, 19 nt, artificial
  Oligomer
guucuuaaguugcugaagc

SEQ ID NO: 3609 - RNA, 19 nt, artificial
  Oligomer
uagcuauuguagaaaacuc

SEQ ID NO: 3610 - RNA, 19 nt, artificial
  Oligomer
agcuauuguagaaaacuca

SEQ ID NO: 3611 - RNA, 19 nt, artificial
  Oligomer
guagaaaacucauuguccc

SEQ ID NO: 3612 - RNA, 19 nt, artificial
  Oligomer
uagaaaacccacuuugccu

SEQ ID NO: 3613 - RNA, 19 nt, artificial
  Oligomer
auuccuccaucuccuguuc

SEQ ID NO: 3614 - RNA, 19 nt, artificial
  Oligomer
agagguccuucaggaaugg

SEQ ID NO: 3615 - RNA, 19 nt, artificial
  Oligomer
caggaauggaacauuuguc

SEQ ID NO: 3616 - RNA, 19 nt, artificial
  Oligomer
uucucaucaugagauaggc

SEQ ID NO: 3617 - RNA, 19 nt, artificial
  Oligomer
auucaagcagagagcagac

SEQ ID NO: 3618 - RNA, 19 nt, artificial
  Oligomer
caaaacugaaaaccagugg

SEQ ID NO: 3619 - RNA, 19 nt, artificial
  Oligomer
uaucaagccuugcuacagu

SEQ ID NO: 3620 - RNA, 19 nt, artificial
  Oligomer
aaaguuuaaugcugcauga

SEQ ID NO: 3621 - RNA, 19 nt, artificial
  Oligomer
aaagcccuuaugagauuuu

SEQ ID NO: 3622 - RNA, 19 nt, artificial
  Oligomer
auuccaaaacuuuggaugg

SEQ ID NO: 3623 - RNA, 19 nt, artificial
  Oligomer
augcccuucaaacuuaggg

SEQ ID NO: 3624 - RNA, 19 nt, artificial
  Oligomer
uaccaugagaaucaaggcu

SEQ ID NO: 3625 - RNA, 19 nt, artificial
  Oligomer
aacauguacacuguuggug

SEQ ID NO: 3626 - RNA, 19 nt, artificial
  Oligomer
aauauugcugucccauccg

SEQ ID NO: 3627 - RNA, 19 nt, artificial
  Oligomer
uuccuccaucuccuguucc

SEQ ID NO: 3628 - RNA, 19 nt, artificial
  Oligomer
uggaauuuguaccagaugg

SEQ ID NO: 3629 - RNA, 19 nt, artificial
  Oligomer
uuuucucaucaugagauag

SEQ ID NO: 3630 - RNA, 19 nt, artificial
  Oligomer
aauagcuguauguaggcag

SEQ ID NO: 3631 - RNA, 19 nt, artificial
  Oligomer
aaggugagguugugaucca

SEQ ID NO: 3632 - RNA, 19 nt, artificial
  Oligomer
aaaauucaagcagagagca

SEQ ID NO: 3633 - RNA, 19 nt, artificial
  Oligomer
aagucacccuacuuaggaa

SEQ ID NO: 3634 - RNA, 19 nt, artificial
  Oligomer
aaaacugaaaaccaguggu

SEQ ID NO: 3635 - RNA, 19 nt, artificial
  Oligomer
uuuuucugagaaaggaucc

SEQ ID NO: 3636 - RNA, 19 nt, artificial
  Oligomer
uagaaaacucauuguccca

SEQ ID NO: 3637 - RNA, 19 nt, artificial
  Oligomer
agaaaacucauugucccac

SEQ ID NO: 3638 - RNA, 19 nt, artificial
  Oligomer
aacagguuguugaaccagg

SEQ ID NO: 3639 - RNA, 19 nt, artificial
  Oligomer
aauccggauucuggagagg

SEQ ID NO: 3640 - RNA, 19 nt, artificial
  Oligomer
aauuccaaaacuuuggaug

SEQ ID NO: 3641 - RNA, 19 nt, artificial
  Oligomer
aagguggugaguauaccag

SEQ ID NO: 3642 - RNA, 19 nt, artificial
  Oligomer
uaaaaagucacccuacuua

SEQ ID NO: 3643 - RNA, 19 nt, artificial
  Oligomer
gagaggcacauucuuaucc

SEQ ID NO: 3644 - RNA, 19 nt, artificial
  Oligomer
uuucuaggauccagacugg

SEQ ID NO: 3645 - RNA, 19 nt, artificial
  Oligomer
gauccagacuggaauaucg

SEQ ID NO: 3646 - RNA, 19 nt, artificial
  Oligomer
auugucccacauuggucuc

SEQ ID NO: 3647 - RNA, 19 nt, artificial
  Oligomer
uugucaaaguuuaaugcug

SEQ ID NO: 3648 - RNA, 19 nt, artificial
  Oligomer
aauggagaagaaaucuucc

SEQ ID NO: 3649 - RNA, 19 nt, artificial
  Oligomer
auggagaagaaaucuuccu

SEQ ID NO: 3650 - RNA, 19 nt, artificial
  Oligomer
ugcaauuccaaaacuuugg

SEQ ID NO: 3651 - RNA, 19 nt, artificial
  Oligomer
uucaggaauggaacauuug

SEQ ID NO: 3652 - RNA, 19 nt, artificial
  Oligomer
auggaacauuuguccagcg

SEQ ID NO: 3653 - RNA, 19 nt, artificial
  Oligomer
aagaugugaaaaacacaca

SEQ ID NO: 3654 - RNA, 19 nt, artificial
  Oligomer
auauuucaggaaggcaucc

SEQ ID NO: 3655 - RNA, 19 nt, artificial
  Oligomer
aaccaaacaaccagaaaca

SEQ ID NO: 3656 - RNA, 19 nt, artificial
  Oligomer
uaaacauguacacuguugg

SEQ ID NO: 3657 - RNA, 19 nt, artificial
  Oligomer
aaagucacccuacuuagga

SEQ ID NO: 3658 - RNA, 19 nt, artificial
  Oligomer
uuuucugagaaaggaucca

SEQ ID NO: 3659 - RNA, 19 nt, artificial
  Oligomer
cagaacuuuaagaacuuca

SEQ ID NO: 3660 - RNA, 19 nt, artificial
  Oligomer
cagacuggaauaucgguga

SEQ ID NO: 3661 - RNA, 19 nt, artificial
  Oligomer
gucaaaguuuaaugcugca

SEQ ID NO: 3662 - RNA, 19 nt, artificial
  Oligomer
cacacuggaauuuguacca

SEQ ID NO: 3663 - RNA, 19 nt, artificial
  Oligomer
acacuggaauuuguaccag

SEQ ID NO: 3664 - RNA, 19 nt, artificial
  Oligomer
uggugaauauuguuguucg

SEQ ID NO: 3665 - RNA, 19 nt, artificial
  Oligomer
cuucucuggacagaacugu

SEQ ID NO: 3666 - RNA, 19 nt, artificial
  Oligomer
uuccaaaacuuuggauggg

SEQ ID NO: 3667 - RNA, 19 nt, artificial
  Oligomer
ugcccuucaaacuuagggc

SEQ ID NO: 3668 - RNA, 19 nt, artificial
  Oligomer
acuccacugucguguuucg

SEQ ID NO: 3669 - RNA, 19 nt, artificial
  Oligomer
gacuggaugggauuuagcc

SEQ ID NO: 3670 - RNA, 19 nt, artificial
  Oligomer
agaugugaaaaacacacac

SEQ ID NO: 3671 - RNA, 19 nt, artificial
  Oligomer
gaugugaaaaacacacacc

SEQ ID NO: 3672 - RNA, 19 nt, artificial
  Oligomer
caggugugcaaugauguga

SEQ ID NO: 3673 - RNA, 19 nt, artificial
  Oligomer
gugugcggcugcaaaauga

SEQ ID NO: 3674 - RNA, 19 nt, artificial
  Oligomer
ugcaaaaugagcaggugcc

SEQ ID NO: 3675 - RNA, 19 nt, artificial
  Oligomer
aaaagucacccuacuuagg

SEQ ID NO: 3676 - RNA, 19 nt, artificial
  Oligomer
aaacugaaaaccagugguu

SEQ ID NO: 3677 - RNA, 19 nt, artificial
  Oligomer
aaccucugcuaucaagccu

SEQ ID NO: 3678 - RNA, 19 nt, artificial
  Oligomer
uagaauugaaccuuucuag

SEQ ID NO: 3679 - RNA, 19 nt, artificial
  Oligomer
uuuucuguuucagaccugu

SEQ ID NO: 3680 - RNA, 19 nt, artificial
  Oligomer
aagagacgguaguuuagaa

SEQ ID NO: 3681 - RNA, 19 nt, artificial
  Oligomer
acgguaguuuagaaaaccc

SEQ ID NO: 3682 - RNA, 19 nt, artificial
  Oligomer
uuccagggaagucaacagg

SEQ ID NO: 3683 - RNA, 19 nt, artificial
  Oligomer
auacuggaaaacauccuca

SEQ ID NO: 3684 - RNA, 19 nt, artificial
  Oligomer
caauccggauucuggagag

SEQ ID NO: 3685 - RNA, 19 nt, artificial
  Oligomer
aauauuguuguucgaaagc

SEQ ID NO: 3686 - RNA, 19 nt, artificial
  Oligomer
uuaugagauuuucugucca

SEQ ID NO: 3687 - RNA, 19 nt, artificial
  Oligomer
uaugagauuuucuguccag

SEQ ID NO: 3688 - RNA, 19 nt, artificial
  Oligomer
cugcucggauaugaaugga

SEQ ID NO: 3689 - RNA, 19 nt, artificial
  Oligomer
aaggaugccauuccaggag

SEQ ID NO: 3690 - RNA, 19 nt, artificial
  Oligomer
ucucuggacagaacugugc

SEQ ID NO: 3691 - RNA, 19 nt, artificial
  Oligomer
uggaacauuuguccagcgc

SEQ ID NO: 3692 - RNA, 19 nt, artificial
  Oligomer
aaauaacuccuccggauga

SEQ ID NO: 3693 - RNA, 19 nt, artificial
  Oligomer
auacuccacugucguguuu

SEQ ID NO: 3694 - RNA, 19 nt, artificial
  Oligomer
agcuuguggaaggugaggu

SEQ ID NO: 3695 - RNA, 19 nt, artificial
  Oligomer
aaggauuuuucuuguguag

SEQ ID NO: 3696 - RNA, 19 nt, artificial
  Oligomer
cacccuacuuaggaaaucu

SEQ ID NO: 3697 - RNA, 19 nt, artificial
  Oligomer
acaaaccaaaacucaggag

SEQ ID NO: 3698 - RNA, 19 nt, artificial
  Oligomer
accagugguuaaccaccca

SEQ ID NO: 3699 - RNA, 19 nt, artificial
  Oligomer
auuuuucugagaaaggauc

SEQ ID NO: 3700 - RNA, 19 nt, artificial
  Oligomer
ucagaacuuuaagaacuuc

SEQ ID NO: 3701 - RNA, 19 nt, artificial
  Oligomer
uugaaccuuucuaggaucc

SEQ ID NO: 3702 - RNA, 19 nt, artificial
  Oligomer
aaccuuucuaggauccaga

SEQ ID NO: 3703 - RNA, 19 nt, artificial
  Oligomer
agacuggaauaucggugac

SEQ ID NO: 3704 - RNA, 19 nt, artificial
  Oligomer
aucggugacagcauuugcg

SEQ ID NO: 3705 - RNA, 19 nt, artificial
  Oligomer
auuguuguucgaaagcccu

SEQ ID NO: 3706 - RNA, 19 nt, artificial
  Oligomer
gcugcucggauaugaaugg

SEQ ID NO: 3707 - RNA, 19 nt, artificial
  Oligomer
gaauggagaagaaaucuuc

SEQ ID NO: 3708 - RNA, 19 nt, artificial
  Oligomer
aagaaaucuuccucuggag

SEQ ID NO: 3709 - RNA, 19 nt, artificial
  Oligomer
aguaaaaggaugccauucc

SEQ ID NO: 3710 - RNA, 19 nt, artificial
  Oligomer
uuguucaucugcaauucca

SEQ ID NO: 3711 - RNA, 19 nt, artificial
  Oligomer
uucucuggacagaacugug

SEQ ID NO: 3712 - RNA, 19 nt, artificial
  Oligomer
caaaacuuuggaugggugc

SEQ ID NO: 3713 - RNA, 19 nt, artificial
  Oligomer
aaacuuuggaugggugcau

SEQ ID NO: 3714 - RNA, 19 nt, artificial
  Oligomer
aaccuugguaaucacaacc

SEQ ID NO: 3715 - RNA, 19 nt, artificial
  Oligomer
aaccggaggauccuuucac

SEQ ID NO: 3716 - RNA, 19 nt, artificial
  Oligomer
gaauggaacauuuguccag

SEQ ID NO: 3717 - RNA, 19 nt, artificial
  Oligomer
aauaacuccuccggaugaa

SEQ ID NO: 3718 - RNA, 19 nt, artificial
  Oligomer
uuaccaugagaaucaaggc

SEQ ID NO: 3719 - RNA, 19 nt, artificial
  Oligomer
gaucacuccagugagacca

SEQ ID NO: 3720 - RNA, 19 nt, artificial
  Oligomer
uaagaugugaaaaacacac

SEQ ID NO: 3721 - RNA, 19 nt, artificial
  Oligomer
auugcuuucucagugugcg

SEQ ID NO: 3722 - RNA, 19 nt, artificial
  Oligomer
ugaauaaguuuauuccgcc

SEQ ID NO: 3723 - RNA, 19 nt, artificial
  Oligomer
aagugacaguaaacaugua

SEQ ID NO: 3724 - RNA, 19 nt, artificial
  Oligomer
cacuguugguguuauaugg

SEQ ID NO: 3725 - RNA, 19 nt, artificial
  Oligomer
uuaggaaaucuucuguggg

SEQ ID NO: 3726 - RNA, 19 nt, artificial
  Oligomer
aaaaucaccugggauuagu

SEQ ID NO: 3727 - RNA, 19 nt, artificial
  Oligomer
aucaagccuugcuacaguc

SEQ ID NO: 3728 - RNA, 19 nt, artificial
  Oligomer
aauugaaccuuucuaggau

SEQ ID NO: 3729 - RNA, 19 nt, artificial
  Oligomer
cuuucuaggauccagacug

SEQ ID NO: 3730 - RNA, 19 nt, artificial
  Oligomer
uaggcaacagggaagauuc

SEQ ID NO: 3731 - RNA, 19 nt, artificial
  Oligomer
auccacuucaauccuggga

SEQ ID NO: 3732 - RNA, 19 nt, artificial
  Oligomer
cuucaauccugggaauugg

SEQ ID NO: 3733 - RNA, 19 nt, artificial
  Oligomer
gagauuuucuguccagucc

SEQ ID NO: 3734 - RNA, 19 nt, artificial
  Oligomer
uggagaagaaaucuuccuc

SEQ ID NO: 3735 - RNA, 19 nt, artificial
  Oligomer
agaagaaaucuuccucugg

SEQ ID NO: 3736 - RNA, 19 nt, artificial
  Oligomer
aagacucugcacacuugcg

SEQ ID NO: 3737 - RNA, 19 nt, artificial
  Oligomer
augacucucauucaugcuc

SEQ ID NO: 3738 - RNA, 19 nt, artificial
  Oligomer
aaaagguggugaguauacc

SEQ ID NO: 3739 - RNA, 19 nt, artificial
  Oligomer
aaucaaggcuauugucaug

SEQ ID NO: 3740 - RNA, 19 nt, artificial
  Oligomer
aucaaggcuauugucauga

SEQ ID NO: 3741 - RNA, 19 nt, artificial
  Oligomer
aaggcuauugucaugauca

SEQ ID NO: 3742 - RNA, 19 nt, artificial
  Oligomer
augaucacuccagugagac

SEQ ID NO: 3743 - RNA, 19 nt, artificial
  Oligomer
uggugaaugucacauacuc

SEQ ID NO: 3744 - RNA, 19 nt, artificial
  Oligomer
cucaucaugagauaggcug

SEQ ID NO: 3745 - RNA, 19 nt, artificial
  Oligomer
agguugugauccaauugcu

SEQ ID NO: 3746 - RNA, 19 nt, artificial
  Oligomer
uuccugggaaugaauaagu

SEQ ID NO: 3747 - RNA, 19 nt, artificial
  Oligomer
caaccagaaacaaaacuga

SEQ ID NO: 3748 - RNA, 19 nt, artificial
  Oligomer
uacaaaccaaaacucagga

SEQ ID NO: 3749 - RNA, 19 nt, artificial
  Oligomer
uuaagaacuucagaaguuc

SEQ ID NO: 3750 - RNA, 19 nt, artificial
  Oligomer
auugaaccuuucuaggauc

SEQ ID NO: 3751 - RNA, 19 nt, artificial
  Oligomer
auccagacuggaauaucgg

SEQ ID NO: 3752 - RNA, 19 nt, artificial
  Oligomer
cauugucccacauuggucu

SEQ ID NO: 3753 - RNA, 19 nt, artificial
  Oligomer
gauucagcaauccggauuc

SEQ ID NO: 3754 - RNA, 19 nt, artificial
  Oligomer
cacagccacuucauacugg

SEQ ID NO: 3755 - RNA, 19 nt, artificial
  Oligomer
aauccugggaauuggugaa

SEQ ID NO: 3756 - RNA, 19 nt, artificial
  Oligomer
gagaagaaaucuuccucug

SEQ ID NO: 3757 - RNA, 19 nt, artificial
  Oligomer
uaaaaggaugccauuccag

SEQ ID NO: 3758 - RNA, 19 nt, artificial
  Oligomer
aaaaggaugccauuccagg

SEQ ID NO: 3759 - RNA, 19 nt, artificial
  Oligomer
aaaacuuuggaugggugca

SEQ ID NO: 3760 - RNA, 19 nt, artificial
  Oligomer
cuugcgaggaugacucuca

SEQ ID NO: 3761 - RNA, 19 nt, artificial
  Oligomer
uagcugaaguuaccaugag

SEQ ID NO: 3762 - RNA, 19 nt, artificial
  Oligomer
augugaaaaacacacaccu

SEQ ID NO: 3763 - RNA, 19 nt, artificial
  Oligomer
ugaauagcuguauguaggc

SEQ ID NO: 3764 - RNA, 19 nt, artificial
  Oligomer
uaggcagaucauauaggcc

SEQ ID NO: 3765 - RNA, 19 nt, artificial
  Oligomer
accagcuuguggaagguga

SEQ ID NO: 3766 - RNA, 19 nt, artificial
  Oligomer
ugcggcugcaaaaugagca

SEQ ID NO: 3767 - RNA, 19 nt, artificial
  Oligomer
cugcaaaaugagcaggugc

SEQ ID NO: 3768 - RNA, 19 nt, artificial
  Oligomer
acaggccaauguugaccca

SEQ ID NO: 3769 - RNA, 19 nt, artificial
  Oligomer
caguaaacauguacacugu

SEQ ID NO: 3770 - RNA, 19 nt, artificial
  Oligomer
aaccaaaacucaggagaug

SEQ ID NO: 3771 - RNA, 19 nt, artificial
  Oligomer
uaaaaucaccugggauuag

SEQ ID NO: 3772 - RNA, 19 nt, artificial
  Oligomer
agccuugcuacagucaugg

SEQ ID NO: 3773 - RNA, 19 nt, artificial
  Oligomer
cuacagucauggcugucca

SEQ ID NO: 3774 - RNA, 19 nt, artificial
  Oligomer
aggcuugagaggcacauuc

SEQ ID NO: 3775 - RNA, 19 nt, artificial
  Oligomer
ucuuugccaaaguccgagg

SEQ ID NO: 3776 - RNA, 19 nt, artificial
  Oligomer
guuuucuguuucagaccug

SEQ ID NO: 3777 - RNA, 19 nt, artificial
  Oligomer
gucaacagguuguugaacc

SEQ ID NO: 3778 - RNA, 19 nt, artificial
  Oligomer
aauuccugcuccaaccagc

SEQ ID NO: 3779 - RNA, 19 nt, artificial
  Oligomer
uucuggagagguccuucag

SEQ ID NO: 3780 - RNA, 19 nt, artificial
  Oligomer
aagccacgcuuguucaucu

SEQ ID NO: 3781 - RNA, 19 nt, artificial
  Oligomer
accuugguaaucacaaccu

SEQ ID NO: 3782 - RNA, 19 nt, artificial
  Oligomer
gguaaucacaaccuucugc

SEQ ID NO: 3783 - RNA, 19 nt, artificial
  Oligomer
uaaaaccggaggauccuuu

SEQ ID NO: 3784 - RNA, 19 nt, artificial
  Oligomer
agacucugcacacuugcga

SEQ ID NO: 3785 - RNA, 19 nt, artificial
  Oligomer
aacauuuguccagcgcagg

SEQ ID NO: 3786 - RNA, 19 nt, artificial
  Oligomer
guuaccaugagaaucaagg

SEQ ID NO: 3787 - RNA, 19 nt, artificial
  Oligomer
gugaaugucacauacucca

SEQ ID NO: 3788 - RNA, 19 nt, artificial
  Oligomer
cugucggcuucugcuauag

SEQ ID NO: 3789 - RNA, 19 nt, artificial
  Oligomer
gacccaaggauuuuucuug

SEQ ID NO: 3790 - RNA, 19 nt, artificial
  Oligomer
acccaaggauuuuucuugu

SEQ ID NO: 3791 - RNA, 19 nt, artificial
  Oligomer
aaggcauccacaaacagga

SEQ ID NO: 3792 - RNA, 19 nt, artificial
  Oligomer
acaguaaacauguacacug

SEQ ID NO: 3793 - RNA, 19 nt, artificial
  Oligomer
aaucaccugggauuaguug

SEQ ID NO: 3794 - RNA, 19 nt, artificial
  Oligomer
aaaccucugcuaucaagcc

SEQ ID NO: 3795 - RNA, 19 nt, artificial
  Oligomer
ucugcuaucaagccuugcu

SEQ ID NO: 3796 - RNA, 19 nt, artificial
  Oligomer
auaccagggagucaaggcu

SEQ ID NO: 3797 - RNA, 19 nt, artificial
  Oligomer
uuucuguuucagaccuguc

SEQ ID NO: 3798 - RNA, 19 nt, artificial
  Oligomer
uucuguuucagaccuguca

SEQ ID NO: 3799 - RNA, 19 nt, artificial
  Oligomer
uucuaggcaacagggaaga

SEQ ID NO: 3800 - RNA, 19 nt, artificial
  Oligomer
aaguuuaaugcugcaugac

SEQ ID NO: 3801 - RNA, 19 nt, artificial
  Oligomer
aaccaggaaaaggcaccug

SEQ ID NO: 3802 - RNA, 19 nt, artificial
  Oligomer
ggaagauucagcaauccgg

SEQ ID NO: 3803 - RNA, 19 nt, artificial
  Oligomer
uugagguuguggucugcac

SEQ ID NO: 3804 - RNA, 19 nt, artificial
  Oligomer
gauuucaagauagaagcaa

SEQ ID NO: 3805 - RNA, 19 nt, artificial
  Oligomer
ucagcaauccggauucugg

SEQ ID NO: 3806 - RNA, 19 nt, artificial
  Oligomer
cauacuggaaaacauccuc

SEQ ID NO: 3807 - RNA, 19 nt, artificial
  Oligomer
augagauuuucuguccagu

SEQ ID NO: 3808 - RNA, 19 nt, artificial
  Oligomer
ugaauggagaagaaaucuu

SEQ ID NO: 3809 - RNA, 19 nt, artificial
  Oligomer
ggagaagaaaucuuccucu

SEQ ID NO: 3810 - RNA, 19 nt, artificial
  Oligomer
gaagaaaucuuccucugga

SEQ ID NO: 3811 - RNA, 19 nt, artificial
  Oligomer
aucuuccucuggagcagag

SEQ ID NO: 3812 - RNA, 19 nt, artificial
  Oligomer
aaaggaugccauuccagga

SEQ ID NO: 3813 - RNA, 19 nt, artificial
  Oligomer
cuuguucaucugcaauucc

SEQ ID NO: 3814 - RNA, 19 nt, artificial
  Oligomer
caauuccaaaacuuuggau

SEQ ID NO: 3815 - RNA, 19 nt, artificial
  Oligomer
aaugaccggugcaaggauc

SEQ ID NO: 3816 - RNA, 19 nt, artificial
  Oligomer
acacuugcgaggaugacuc

SEQ ID NO: 3817 - RNA, 19 nt, artificial
  Oligomer
gucaugaucacuccaguga

SEQ ID NO: 3818 - RNA, 19 nt, artificial
  Oligomer
gugaaaaacacacaccuac

SEQ ID NO: 3819 - RNA, 19 nt, artificial
  Oligomer
gaauagcuguauguaggca

SEQ ID NO: 3820 - RNA, 19 nt, artificial
  Oligomer
uugcuuucucagugugcgg

SEQ ID NO: 3821 - RNA, 19 nt, artificial
  Oligomer
aaaaccagugguuaaccac

SEQ ID NO: 3822 - RNA, 19 nt, artificial
  Oligomer
aaaccagugguuaaccacc

SEQ ID NO: 3823 - RNA, 19 nt, artificial
  Oligomer
cucugcuaucaagccuugc

SEQ ID NO: 3824 - RNA, 19 nt, artificial
  Oligomer
aacuucagaaguucuuaag

SEQ ID NO: 3825 - RNA, 19 nt, artificial
  Oligomer
ugcugaagcucaaguaacg

SEQ ID NO: 3826 - RNA, 19 nt, artificial
  Oligomer
guugaaguagaauugaacc

SEQ ID NO: 3827 - RNA, 19 nt, artificial
  Oligomer
acucauugucccacauugg

SEQ ID NO: 3828 - RNA, 19 nt, artificial
  Oligomer
gaagucaacagguuguuga

SEQ ID NO: 3829 - RNA, 19 nt, artificial
  Oligomer
ucaacagguuguugaacca

SEQ ID NO: 3830 - RNA, 19 nt, artificial
  Oligomer
acagaacugugcuaucagc

SEQ ID NO: 3831 - RNA, 19 nt, artificial
  Oligomer
aaaucuuccucuggagcag

SEQ ID NO: 3832 - RNA, 19 nt, artificial
  Oligomer
gcaauuccaaaacuuugga

SEQ ID NO: 3833 - RNA, 19 nt, artificial
  Oligomer
gggugcauaacaaccuugg

SEQ ID NO: 3834 - RNA, 19 nt, artificial
  Oligomer
ggaugacucucauucaugc

SEQ ID NO: 3835 - RNA, 19 nt, artificial
  Oligomer
aggcagaucauauaggcca

SEQ ID NO: 3836 - RNA, 19 nt, artificial
  Oligomer
gugcuguuaaaauucaagc

SEQ ID NO: 3837 - RNA, 19 nt, artificial
  Oligomer
ugcuguuaaaauucaagca

SEQ ID NO: 3838 - RNA, 19 nt, artificial
  Oligomer
uguuaaaauucaagcagag

SEQ ID NO: 3839 - RNA, 19 nt, artificial
  Oligomer
gaauaaguuuauuccgccu

SEQ ID NO: 3840 - RNA, 19 nt, artificial
  Oligomer
acaaaacugaaaaccagug

SEQ ID NO: 3841 - RNA, 19 nt, artificial
  Oligomer
uuucugagaaaggauccau

SEQ ID NO: 3842 - RNA, 19 nt, artificial
  Oligomer
ugguuaaccacccaguuuc

SEQ ID NO: 3843 - RNA, 19 nt, artificial
  Oligomer
uuaaguugcugaagcucaa

SEQ ID NO: 3844 - RNA, 19 nt, artificial
  Oligomer
ucccauugucaagaggugg

SEQ ID NO: 3845 - RNA, 19 nt, artificial
  Oligomer
gaaccuuucuaggauccag

SEQ ID NO: 3846 - RNA, 19 nt, artificial
  Oligomer
aggcucuuugccaaagucc

SEQ ID NO: 3847 - RNA, 19 nt, artificial
  Oligomer
aaggagguuuucuguuuca

SEQ ID NO: 3848 - RNA, 19 nt, artificial
  Oligomer
aggagguuuucuguuucag

SEQ ID NO: 3849 - RNA, 19 nt, artificial
  Oligomer
guuccagggaagucaacag

SEQ ID NO: 3850 - RNA, 19 nt, artificial
  Oligomer
uggaaaacauccucacugg

SEQ ID NO: 3851 - RNA, 19 nt, artificial
  Oligomer
aaaacauccucacuggcug

SEQ ID NO: 3852 - RNA, 19 nt, artificial
  Oligomer
aacauccucacuggcugug

SEQ ID NO: 3853 - RNA, 19 nt, artificial
  Oligomer
uucaauccugggaauuggu

SEQ ID NO: 3854 - RNA, 19 nt, artificial
  Oligomer
guaaaaggaugccauucca

SEQ ID NO: 3855 - RNA, 19 nt, artificial
  Oligomer
uccaaaacuuuggaugggu

SEQ ID NO: 3856 - RNA, 19 nt, artificial
  Oligomer
ugggugcauaacaaccuug

SEQ ID NO: 3857 - RNA, 19 nt, artificial
  Oligomer
aaagguggugaguauacca

SEQ ID NO: 3858 - RNA, 19 nt, artificial
  Oligomer
caacgcuggugaaugucac

SEQ ID NO: 3859 - RNA, 19 nt, artificial
  Oligomer
auagcuguauguaggcaga

SEQ ID NO: 3860 - RNA, 19 nt, artificial
  Oligomer
gauaagaccauaucaaaag

SEQ ID NO: 3861 - RNA, 19 nt, artificial
  Oligomer
gaaaaccagugguuaacca

SEQ ID NO: 3862 - RNA, 19 nt, artificial
  Oligomer
uucugagaaaggauccaug

SEQ ID NO: 3863 - RNA, 19 nt, artificial
  Oligomer
uaagaacuucagaaguucu

SEQ ID NO: 3864 - RNA, 19 nt, artificial
  Oligomer
aagaacuucagaaguucuu

SEQ ID NO: 3865 - RNA, 19 nt, artificial
  Oligomer
gucaagaggugguuuggag

SEQ ID NO: 3866 - RNA, 19 nt, artificial
  Oligomer
uuuggagcccuucuaggca

SEQ ID NO: 3867 - RNA, 19 nt, artificial
  Oligomer
cuguuucagaccugucacg

SEQ ID NO: 3868 - RNA, 19 nt, artificial
  Oligomer
agaccugucacgaugucag

SEQ ID NO: 3869 - RNA, 19 nt, artificial
  Oligomer
uccuguuccagggaaguca

SEQ ID NO: 3870 - RNA, 19 nt, artificial
  Oligomer
acagccacuucauacugga

SEQ ID NO: 3871 - RNA, 19 nt, artificial
  Oligomer
cuggaaaacauccucacug

SEQ ID NO: 3872 - RNA, 19 nt, artificial
  Oligomer
gaugggugcauaacaaccu

SEQ ID NO: 3873 - RNA, 19 nt, artificial
  Oligomer
augggugcauaacaaccuu

SEQ ID NO: 3874 - RNA, 19 nt, artificial
  Oligomer
aucacaaccuucugcuggg

SEQ ID NO: 3875 - RNA, 19 nt, artificial
  Oligomer
aagaaugaccggugcaagg

SEQ ID NO: 3876 - RNA, 19 nt, artificial
  Oligomer
aggcuauugucaugaucac

SEQ ID NO: 3877 - RNA, 19 nt, artificial
  Oligomer
aucacuccagugagaccag

SEQ ID NO: 3878 - RNA, 19 nt, artificial
  Oligomer
uugcgacacacaggaagca

SEQ ID NO: 3879 - RNA, 19 nt, artificial
  Oligomer
gcuguuaaaauucaagcag

SEQ ID NO: 3880 - RNA, 19 nt, artificial
  Oligomer
accaaaacucaggagaugg

SEQ ID NO: 3881 - RNA, 19 nt, artificial
  Oligomer
aagccuugcuacagucaug

SEQ ID NO: 3882 - RNA, 19 nt, artificial
  Oligomer
aaguugcugaagcucaagu

SEQ ID NO: 3883 - RNA, 19 nt, artificial
  Oligomer
agaauugaaccuuucuagg

SEQ ID NO: 3884 - RNA, 19 nt, artificial
  Oligomer
uucuaggauccagacugga

SEQ ID NO: 3885 - RNA, 19 nt, artificial
  Oligomer
gaaccaggaaaaggcaccu

SEQ ID NO: 3886 - RNA, 19 nt, artificial
  Oligomer
accaggaaaaggcaccugu

SEQ ID NO: 3887 - RNA, 19 nt, artificial
  Oligomer
ggaccauccacuucaaucc

SEQ ID NO: 3888 - RNA, 19 nt, artificial
  Oligomer
gugcaaggauccacuucca

SEQ ID NO: 3889 - RNA, 19 nt, artificial
  Oligomer
agaaucaaggcuauuguca

SEQ ID NO: 3890 - RNA, 19 nt, artificial
  Oligomer
augggauuuagccaagaac

SEQ ID NO: 3891 - RNA, 19 nt, artificial
  Oligomer
uguucacacuggauaagac

SEQ ID NO: 3892 - RNA, 19 nt, artificial
  Oligomer
uucacacuggauaagacca

SEQ ID NO: 3893 - RNA, 19 nt, artificial
  Oligomer
caggagaugguaacacugg

SEQ ID NO: 3894 - RNA, 19 nt, artificial
  Oligomer
uucuuaaguugcugaagcu

SEQ ID NO: 3895 - RNA, 19 nt, artificial
  Oligomer
auuggucucccaaaggagg

SEQ ID NO: 3896 - RNA, 19 nt, artificial
  Oligomer
aaacauccucacuggcugu

SEQ ID NO: 3897 - RNA, 19 nt, artificial
  Oligomer
ugaaucccuaagccaagga

SEQ ID NO: 3898 - RNA, 19 nt, artificial
  Oligomer
uauaggccaccagcuugug

SEQ ID NO: 3899 - RNA, 19 nt, artificial
  Oligomer
aaacauguacacuguuggu

SEQ ID NO: 3900 - RNA, 19 nt, artificial
  Oligomer
agucaaggcuugagaggca

SEQ ID NO: 3901 - RNA, 19 nt, artificial
  Oligomer
uuggucucccaaaggaggu

SEQ ID NO: 3902 - RNA, 19 nt, artificial
  Oligomer
ucccaaaggagguuuucug

SEQ ID NO: 3903 - RNA, 19 nt, artificial
  Oligomer
uauugcugucccauccggu

SEQ ID NO: 3904 - RNA, 19 nt, artificial
  Oligomer
gugaaucccuaagccaagg

SEQ ID NO: 3905 - RNA, 19 nt, artificial
  Oligomer
aaacaaaacugaaaaccag

SEQ ID NO: 3906 - RNA, 19 nt, artificial
  Oligomer
guaaacauguacacuguug

SEQ ID NO: 3907 - RNA, 19 nt, artificial
  Oligomer
ggaauugauaaaaucaccu

SEQ ID NO: 3908 - RNA, 19 nt, artificial
  Oligomer
aaaggauccaugggcuuua

SEQ ID NO: 3909 - RNA, 19 nt, artificial
  Oligomer
gagguuuucuguuucagac

SEQ ID NO: 3910 - RNA, 19 nt, artificial
  Oligomer
aaggauccacuuccaagac

SEQ ID NO: 3911 - RNA, 19 nt, artificial
  Oligomer
uucauacuggaaaacaucc

SEQ ID NO: 3912 - RNA, 19 nt, artificial
  Oligomer
acauuggucucccaaagga

SEQ ID NO: 3913 - RNA, 19 nt, artificial
  Oligomer
uugcuacagucauggcugu

SEQ ID NO: 3914 - RNA, 19 nt, artificial
  Oligomer
aaaaggcaccugucucccu

SEQ ID NO: 3915 - RNA, 19 nt, artificial
  Oligomer
ucauacuggaaaacauccu

SEQ ID NO: 3916 - RNA, 19 nt, artificial
  Oligomer
cucaguagcugaaguuacc

SEQ ID NO: 3917 - RNA, 21 nt, artificial
  Oligomer
gcagucacuuuaggauaagaa

SEQ ID NO: 3918 - RNA, 21 nt, artificial
  Oligomer
ggacaaugaguuuucuacaau

SEQ ID NO: 3919 - RNA, 21 nt, artificial
  Oligomer
cagucacuuuaggauaagaau

SEQ ID NO: 3920 - RNA, 21 nt, artificial
  Oligomer
gcaaaguggguuuucuaaacu

SEQ ID NO: 3921 - RNA, 21 nt, artificial
  Oligomer
gggcugaauguuuuccuguuu

SEQ ID NO: 3922 - RNA, 21 nt, artificial
  Oligomer
acauguuuacugucacuuuug

SEQ ID NO: 3923 - RNA, 21 nt, artificial
  Oligomer
gaaauccaucugguacaaauu

SEQ ID NO: 3924 - RNA, 21 nt, artificial
  Oligomer
ccucaaucucucuccuggaau

SEQ ID NO: 3925 - RNA, 21 nt, artificial
  Oligomer
gcacaccuguuuaacuuugac

SEQ ID NO: 3926 - RNA, 21 nt, artificial
  Oligomer
acaucauugcacaccuguuua

SEQ ID NO: 3927 - RNA, 21 nt, artificial
  Oligomer
gcgucugcucucugcuugaau

SEQ ID NO: 3928 - RNA, 21 nt, artificial
  Oligomer
caaaguggguuuucuaaacua

SEQ ID NO: 3929 - RNA, 21 nt, artificial
  Oligomer
ccacaaccucaaaacaaaaaa

SEQ ID NO: 3930 - RNA, 21 nt, artificial
  Oligomer
gggcaguauaucuuuguuaau

SEQ ID NO: 3931 - RNA, 21 nt, artificial
  Oligomer
ccggucauucuuuauaucugu

SEQ ID NO: 3932 - RNA, 21 nt, artificial
  Oligomer
ugcauucaacuucguuacuug

SEQ ID NO: 3933 - RNA, 21 nt, artificial
  Oligomer
gcaaaugcugucaccgauauu

SEQ ID NO: 3934 - RNA, 21 nt, artificial
  Oligomer
ccaagucuguagugggaguuu

SEQ ID NO: 3935 - RNA, 21 nt, artificial
  Oligomer
gcaccggucauucuuuauauc

SEQ ID NO: 3936 - RNA, 21 nt, artificial
  Oligomer
acauacagcuauucacaucau

SEQ ID NO: 3937 - RNA, 21 nt, artificial
  Oligomer
gccuauaugaucugccuacau

SEQ ID NO: 3938 - RNA, 21 nt, artificial
  Oligomer
ggaucacaaccucaccuucca

SEQ ID NO: 3939 - RNA, 21 nt, artificial
  Oligomer
cgacaaauacuacuacacaag

SEQ ID NO: 3940 - RNA, 21 nt, artificial
  Oligomer
ggaguuuucuuauguggcccu

SEQ ID NO: 3941 - RNA, 21 nt, artificial
  Oligomer
ggaauuaggcaaaguggguuu

SEQ ID NO: 3942 - RNA, 21 nt, artificial
  Oligomer
gcagaccacaaccucaaaaca

SEQ ID NO: 3943 - RNA, 21 nt, artificial
  Oligomer
caaauuccagugugcagacca

SEQ ID NO: 3944 - RNA, 21 nt, artificial
  Oligomer
ggcuuagggauucacggcauu

SEQ ID NO: 3945 - RNA, 21 nt, artificial
  Oligomer
ggaguuauuuugaagucuucu

SEQ ID NO: 3946 - RNA, 21 nt, artificial
  Oligomer
gacaguggaguaugugacauu

SEQ ID NO: 3947 - RNA, 21 nt, artificial
  Oligomer
ugcacaccuguuuaacuuuga

SEQ ID NO: 3948 - RNA, 21 nt, artificial
  Oligomer
gcuauucacaucauugcacac

SEQ ID NO: 3949 - RNA, 21 nt, artificial
  Oligomer
agcagucacuuuaggauaaga

SEQ ID NO: 3950 - RNA, 21 nt, artificial
  Oligomer
gagcagucacuuuaggauaag

SEQ ID NO: 3951 - RNA, 21 nt, artificial
  Oligomer
cuguagugggaguuuucuuau

SEQ ID NO: 3952 - RNA, 21 nt, artificial
  Oligomer
gaccacaaccucaaaacaaaa

SEQ ID NO: 3953 - RNA, 21 nt, artificial
  Oligomer
cggucauucuuuauaucugug

SEQ ID NO: 3954 - RNA, 21 nt, artificial
  Oligomer
ugcaccggucauucuuuauau

SEQ ID NO: 3955 - RNA, 21 nt, artificial
  Oligomer
gaggaguuauuuugaagucuu

SEQ ID NO: 3956 - RNA, 21 nt, artificial
  Oligomer
ggaggaguuauuuugaagucu

SEQ ID NO: 3957 - RNA, 21 nt, artificial
  Oligomer
cacaucauugcacaccuguuu

SEQ ID NO: 3958 - RNA, 21 nt, artificial
  Oligomer
cauacagcuauucacaucauu

SEQ ID NO: 3959 - RNA, 21 nt, artificial
  Oligomer
gagaaagcaauuggaucacaa

SEQ ID NO: 3960 - RNA, 21 nt, artificial
  Oligomer
gaaauaugagaaggccgacaa

SEQ ID NO: 3961 - RNA, 21 nt, artificial
  Oligomer
ggaaggcggaauaaacuuauu

SEQ ID NO: 3962 - RNA, 21 nt, artificial
  Oligomer
ggcugaauguuuuccuguuug

SEQ ID NO: 3963 - RNA, 21 nt, artificial
  Oligomer
ugguucagaguuauacaacua

SEQ ID NO: 3964 - RNA, 21 nt, artificial
  Oligomer
gcauuuugucucuuuguaucu

SEQ ID NO: 3965 - RNA, 21 nt, artificial
  Oligomer
guagugggaguuuucuuaugu

SEQ ID NO: 3966 - RNA, 21 nt, artificial
  Oligomer
gcauuaaacuuugacaaggcc

SEQ ID NO: 3967 - RNA, 21 nt, artificial
  Oligomer
ugaaauccaucugguacaaau

SEQ ID NO: 3968 - RNA, 21 nt, artificial
  Oligomer
gcauccuuuuacuuugaccuc

SEQ ID NO: 3969 - RNA, 21 nt, artificial
  Oligomer
ggcauccuuuuacuuugaccu

SEQ ID NO: 3970 - RNA, 21 nt, artificial
  Oligomer
aguuuuggaauugcagaugaa

SEQ ID NO: 3971 - RNA, 21 nt, artificial
  Oligomer
gugugcagagucuuuugagau

SEQ ID NO: 3972 - RNA, 21 nt, artificial
  Oligomer
ggagagcaugaaugagaguca

SEQ ID NO: 3973 - RNA, 21 nt, artificial
  Oligomer
cgacaguggaguaugugacau

SEQ ID NO: 3974 - RNA, 21 nt, artificial
  Oligomer
gaaaaauccuugggucaacau

SEQ ID NO: 3975 - RNA, 21 nt, artificial
  Oligomer
ccgacaaauacuacuacacaa

SEQ ID NO: 3976 - RNA, 21 nt, artificial
  Oligomer
gccgacaaauacuacuacaca

SEQ ID NO: 3977 - RNA, 21 nt, artificial
  Oligomer
ugccuuccugaaauaugagaa

SEQ ID NO: 3978 - RNA, 21 nt, artificial
  Oligomer
gcugaauguuuuccuguuugu

SEQ ID NO: 3979 - RNA, 21 nt, artificial
  Oligomer
caguuuuguuucugguuguuu

SEQ ID NO: 3980 - RNA, 21 nt, artificial
  Oligomer
gucacuuuugauauggucuua

SEQ ID NO: 3981 - RNA, 21 nt, artificial
  Oligomer
gguucagaguuauacaacuaa

SEQ ID NO: 3982 - RNA, 21 nt, artificial
  Oligomer
ccagagaaggaaggcggaaua

SEQ ID NO: 3983 - RNA, 21 nt, artificial
  Oligomer
ugagcagucacuuuaggauaa

SEQ ID NO: 3984 - RNA, 21 nt, artificial
  Oligomer
cugcauuuugucucuuuguau

SEQ ID NO: 3985 - RNA, 21 nt, artificial
  Oligomer
gaaagguucaauucuacuuca

SEQ ID NO: 3986 - RNA, 21 nt, artificial
  Oligomer
agaccacaaccucaaaacaaa

SEQ ID NO: 3987 - RNA, 21 nt, artificial
  Oligomer
cccuuugcuucuaucuugaaa

SEQ ID NO: 3988 - RNA, 21 nt, artificial
  Oligomer
acagaaaaucucauaagggcu

SEQ ID NO: 3989 - RNA, 21 nt, artificial
  Oligomer
ggacagaaaaucucauaaggg

SEQ ID NO: 3990 - RNA, 21 nt, artificial
  Oligomer
ggucauucuuuauaucuguga

SEQ ID NO: 3991 - RNA, 21 nt, artificial
  Oligomer
cggaggaguuauuuugaaguc

SEQ ID NO: 3992 - RNA, 21 nt, artificial
  Oligomer
ccggaggaguuauuuugaagu

SEQ ID NO: 3993 - RNA, 21 nt, artificial
  Oligomer
caguggaguaugugacauuca

SEQ ID NO: 3994 - RNA, 21 nt, artificial
  Oligomer
acaguggaguaugugacauuc

SEQ ID NO: 3995 - RNA, 21 nt, artificial
  Oligomer
acaccuguuuaacuuugacug

SEQ ID NO: 3996 - RNA, 21 nt, artificial
  Oligomer
cacaccuguuuaacuuugacu

SEQ ID NO: 3997 - RNA, 21 nt, artificial
  Oligomer
agaaagcaauuggaucacaac

SEQ ID NO: 3998 - RNA, 21 nt, artificial
  Oligomer
cgucugcucucugcuugaauu

SEQ ID NO: 3999 - RNA, 21 nt, artificial
  Oligomer
ggccgacaaauacuacuacac

SEQ ID NO: 4000 - RNA, 21 nt, artificial
  Oligomer
gucuguagugggaguuuucuu

SEQ ID NO: 4001 - RNA, 21 nt, artificial
  Oligomer
gaauuaggcaaaguggguuuu

SEQ ID NO: 4002 - RNA, 21 nt, artificial
  Oligomer
ugccuuuuccugguucaacaa

SEQ ID NO: 4003 - RNA, 21 nt, artificial
  Oligomer
uugaaauccaucugguacaaa

SEQ ID NO: 4004 - RNA, 21 nt, artificial
  Oligomer
ccuuuuacuuugaccucugcu

SEQ ID NO: 4005 - RNA, 21 nt, artificial
  Oligomer
caccggucauucuuuauaucu

SEQ ID NO: 4006 - RNA, 21 nt, artificial
  Oligomer
gcagagucuuuugagaugugg

SEQ ID NO: 4007 - RNA, 21 nt, artificial
  Oligomer
gugcagagucuuuugagaugu

SEQ ID NO: 4008 - RNA, 21 nt, artificial
  Oligomer
aggaguuauuuugaagucuuc

SEQ ID NO: 4009 - RNA, 21 nt, artificial
  Oligomer
cuccagccuaucucaugauga

SEQ ID NO: 4010 - RNA, 21 nt, artificial
  Oligomer
ccauucucuccagccuaucuc

SEQ ID NO: 4011 - RNA, 21 nt, artificial
  Oligomer
ccuacauacagcuauucacau

SEQ ID NO: 4012 - RNA, 21 nt, artificial
  Oligomer
gcucucugcuugaauuuuaac

SEQ ID NO: 4013 - RNA, 21 nt, artificial
  Oligomer
cccaggugauuuuaucaauuc

SEQ ID NO: 4014 - RNA, 21 nt, artificial
  Oligomer
auacaacuaaucccaggugau

SEQ ID NO: 4015 - RNA, 21 nt, artificial
  Oligomer
ugauugcauucaacuucguua

SEQ ID NO: 4016 - RNA, 21 nt, artificial
  Oligomer
caagucuguagugggaguuuu

SEQ ID NO: 4017 - RNA, 21 nt, artificial
  Oligomer
gcaauauuguuggucaugcag

SEQ ID NO: 4018 - RNA, 21 nt, artificial
  Oligomer
ggauugcugaaucuucccugu

SEQ ID NO: 4019 - RNA, 21 nt, artificial
  Oligomer
ugcagaccacaaccucaaaac

SEQ ID NO: 4020 - RNA, 21 nt, artificial
  Oligomer
cuugcaccggucauucuuuau

SEQ ID NO: 4021 - RNA, 21 nt, artificial
  Oligomer
gagucuuuugagaugugggau

SEQ ID NO: 4022 - RNA, 21 nt, artificial
  Oligomer
ugcagagucuuuugagaugug

SEQ ID NO: 4023 - RNA, 21 nt, artificial
  Oligomer
caaacagaggagagcaugaau

SEQ ID NO: 4024 - RNA, 21 nt, artificial
  Oligomer
uggcuuagggauucacggcau

SEQ ID NO: 4025 - RNA, 21 nt, artificial
  Oligomer
caccaccuuuuuaucuucuau

SEQ ID NO: 4026 - RNA, 21 nt, artificial
  Oligomer
ucaccaccuuuuuaucuucua

SEQ ID NO: 4027 - RNA, 21 nt, artificial
  Oligomer
ucacaucuuaaaggcucacag

SEQ ID NO: 4028 - RNA, 21 nt, artificial
  Oligomer
uccggaggaguuauuuugaag

SEQ ID NO: 4029 - RNA, 21 nt, artificial
  Oligomer
acaauagccuugauucucaug

SEQ ID NO: 4030 - RNA, 21 nt, artificial
  Oligomer
cuacauacagcuauucacauc

SEQ ID NO: 4031 - RNA, 21 nt, artificial
  Oligomer
ugagaaagcaauuggaucaca

SEQ ID NO: 4032 - RNA, 21 nt, artificial
  Oligomer
acacugagaaagcaauuggau

SEQ ID NO: 4033 - RNA, 21 nt, artificial
  Oligomer
agaaaaauccuugggucaaca

SEQ ID NO: 4034 - RNA, 21 nt, artificial
  Oligomer
gacaaauacuacuacacaaga

SEQ ID NO: 4035 - RNA, 21 nt, artificial
  Oligomer
cugaauguuuuccuguuugug

SEQ ID NO: 4036 - RNA, 21 nt, artificial
  Oligomer
gguuguuugguuagggcugaa

SEQ ID NO: 4037 - RNA, 21 nt, artificial
  Oligomer
ucccaggugauuuuaucaauu

SEQ ID NO: 4038 - RNA, 21 nt, artificial
  Oligomer
uugauugcauucaacuucguu

SEQ ID NO: 4039 - RNA, 21 nt, artificial
  Oligomer
guaauuuacuuggucucguca

SEQ ID NO: 4040 - RNA, 21 nt, artificial
  Oligomer
gaguuuucuuauguggcccuc

SEQ ID NO: 4041 - RNA, 21 nt, artificial
  Oligomer
caaugaguuuucuacaauagc

SEQ ID NO: 4042 - RNA, 21 nt, artificial
  Oligomer
gacagcaauauuguuggucau

SEQ ID NO: 4043 - RNA, 21 nt, artificial
  Oligomer
gagauggaggaauuaggcaaa

SEQ ID NO: 4044 - RNA, 21 nt, artificial
  Oligomer
ggagauggaggaauuaggcaa

SEQ ID NO: 4045 - RNA, 21 nt, artificial
  Oligomer
cagaccacaaccucaaaacaa

SEQ ID NO: 4046 - RNA, 21 nt, artificial
  Oligomer
ccaggauugaaguggaugguc

SEQ ID NO: 4047 - RNA, 21 nt, artificial
  Oligomer
acaacaauauucaccaauucc

SEQ ID NO: 4048 - RNA, 21 nt, artificial
  Oligomer
caaaguuuuggaauugcagau

SEQ ID NO: 4049 - RNA, 21 nt, artificial
  Oligomer
ugugauuaccaagguuguuau

SEQ ID NO: 4050 - RNA, 21 nt, artificial
  Oligomer
gaggagagcaugaaugagagu

SEQ ID NO: 4051 - RNA, 21 nt, artificial
  Oligomer
agaggagagcaugaaugagag

SEQ ID NO: 4052 - RNA, 21 nt, artificial
  Oligomer
cacaucuuaaaggcucacaga

SEQ ID NO: 4053 - RNA, 21 nt, artificial
  Oligomer
ugaagucuucugguauacuca

SEQ ID NO: 4054 - RNA, 21 nt, artificial
  Oligomer
acgacaguggaguaugugaca

SEQ ID NO: 4055 - RNA, 21 nt, artificial
  Oligomer
ccgaaacacgacaguggagua

SEQ ID NO: 4056 - RNA, 21 nt, artificial
  Oligomer
cuccauucucuccagccuauc

SEQ ID NO: 4057 - RNA, 21 nt, artificial
  Oligomer
ccuauaugaucugccuacaua

SEQ ID NO: 4058 - RNA, 21 nt, artificial
  Oligomer
ucacaaccucaccuuccacaa

SEQ ID NO: 4059 - RNA, 21 nt, artificial
  Oligomer
gaaggccgacaaauacuacua

SEQ ID NO: 4060 - RNA, 21 nt, artificial
  Oligomer
aaauaugagaaggccgacaaa

SEQ ID NO: 4061 - RNA, 21 nt, artificial
  Oligomer
cugaaauaugagaaggccgac

SEQ ID NO: 4062 - RNA, 21 nt, artificial
  Oligomer
ugguuagggcugaauguuuuc

SEQ ID NO: 4063 - RNA, 21 nt, artificial
  Oligomer
gguuuggugguucagaguuau

SEQ ID NO: 4064 - RNA, 21 nt, artificial
  Oligomer
acaaugggaaacugggugguu

SEQ ID NO: 4065 - RNA, 21 nt, artificial
  Oligomer
caacuucguuacuugagcuuc

SEQ ID NO: 4066 - RNA, 21 nt, artificial
  Oligomer
ccucuugacaaugggaaacug

SEQ ID NO: 4067 - RNA, 21 nt, artificial
  Oligomer
guaaucugcauuuugucucuu

SEQ ID NO: 4068 - RNA, 21 nt, artificial
  Oligomer
caaccuguugacuucccugga

SEQ ID NO: 4069 - RNA, 21 nt, artificial
  Oligomer
accacaaccucaaaacaaaaa

SEQ ID NO: 4070 - RNA, 21 nt, artificial
  Oligomer
uccuuuuacuuugaccucugc

SEQ ID NO: 4071 - RNA, 21 nt, artificial
  Oligomer
auccuuuuacuuugaccucug

SEQ ID NO: 4072 - RNA, 21 nt, artificial
  Oligomer
gugauuaccaagguuguuaug

SEQ ID NO: 4073 - RNA, 21 nt, artificial
  Oligomer
gcuuagggauucacggcauug

SEQ ID NO: 4074 - RNA, 21 nt, artificial
  Oligomer
guauacucaccaccuuuuuau

SEQ ID NO: 4075 - RNA, 21 nt, artificial
  Oligomer
ccuccauucucuccagccuau

SEQ ID NO: 4076 - RNA, 21 nt, artificial
  Oligomer
gcacacugagaaagcaauugg

SEQ ID NO: 4077 - RNA, 21 nt, artificial
  Oligomer
gcuuccugugugucgcaaucu

SEQ ID NO: 4078 - RNA, 21 nt, artificial
  Oligomer
aggaaggcggaauaaacuuau

SEQ ID NO: 4079 - RNA, 21 nt, artificial
  Oligomer
agggcugaauguuuuccuguu

SEQ ID NO: 4080 - RNA, 21 nt, artificial
  Oligomer
cugucacuuuugauauggucu

SEQ ID NO: 4081 - RNA, 21 nt, artificial
  Oligomer
ucagaguuauacaacuaaucc

SEQ ID NO: 4082 - RNA, 21 nt, artificial
  Oligomer
ggugguucagaguuauacaac

SEQ ID NO: 4083 - RNA, 21 nt, artificial
  Oligomer
cccugguauucuuuuuuugau

SEQ ID NO: 4084 - RNA, 21 nt, artificial
  Oligomer
gacucccugguauucuuuuuu

SEQ ID NO: 4085 - RNA, 21 nt, artificial
  Oligomer
aguaauuuacuuggucucguc

SEQ ID NO: 4086 - RNA, 21 nt, artificial
  Oligomer
gucucuuuguaucuucaguaa

SEQ ID NO: 4087 - RNA, 21 nt, artificial
  Oligomer
ggacgguaaucugcauuuugu

SEQ ID NO: 4088 - RNA, 21 nt, artificial
  Oligomer
auaaggacgguaaucugcauu

SEQ ID NO: 4089 - RNA, 21 nt, artificial
  Oligomer
uuguuggucaugcagcauuaa

SEQ ID NO: 4090 - RNA, 21 nt, artificial
  Oligomer
auauuguuggucaugcagcau

SEQ ID NO: 4091 - RNA, 21 nt, artificial
  Oligomer
gauugcugaaucuucccuguu

SEQ ID NO: 4092 - RNA, 21 nt, artificial
  Oligomer
ggaacaggagauggaggaauu

SEQ ID NO: 4093 - RNA, 21 nt, artificial
  Oligomer
caguaugaaguggcugugcug

SEQ ID NO: 4094 - RNA, 21 nt, artificial
  Oligomer
gggucaaacagaggagagcau

SEQ ID NO: 4095 - RNA, 21 nt, artificial
  Oligomer
cuugauucucaugguaacuuc

SEQ ID NO: 4096 - RNA, 21 nt, artificial
  Oligomer
cugagaaagcaauuggaucac

SEQ ID NO: 4097 - RNA, 21 nt, artificial
  Oligomer
ccagugugaacagcaauuuau

SEQ ID NO: 4098 - RNA, 21 nt, artificial
  Oligomer
cagagaaggaaggcggaauaa

SEQ ID NO: 4099 - RNA, 21 nt, artificial
  Oligomer
ucaauuccaguguuaccaucu

SEQ ID NO: 4100 - RNA, 21 nt, artificial
  Oligomer
gaguuauacaacuaaucccag

SEQ ID NO: 4101 - RNA, 21 nt, artificial
  Oligomer
cagcaacuuaagaacuucuga

SEQ ID NO: 4102 - RNA, 21 nt, artificial
  Oligomer
caaugggaaacugggugguua

SEQ ID NO: 4103 - RNA, 21 nt, artificial
  Oligomer
uuacuuggucucgucagguuu

SEQ ID NO: 4104 - RNA, 21 nt, artificial
  Oligomer
accucuugacaaugggaaacu

SEQ ID NO: 4105 - RNA, 21 nt, artificial
  Oligomer
cuucaguaauuuacuuggucu

SEQ ID NO: 4106 - RNA, 21 nt, artificial
  Oligomer
gguaaucugcauuuugucucu

SEQ ID NO: 4107 - RNA, 21 nt, artificial
  Oligomer
gacgguaaucugcauuuuguc

SEQ ID NO: 4108 - RNA, 21 nt, artificial
  Oligomer
aggacgguaaucugcauuuug

SEQ ID NO: 4109 - RNA, 21 nt, artificial
  Oligomer
aaggacgguaaucugcauuuu

SEQ ID NO: 4110 - RNA, 21 nt, artificial
  Oligomer
uaaggacgguaaucugcauuu

SEQ ID NO: 4111 - RNA, 21 nt, artificial
  Oligomer
aggaauaaggacgguaaucug

SEQ ID NO: 4112 - RNA, 21 nt, artificial
  Oligomer
acagcaauauuguuggucaug

SEQ ID NO: 4113 - RNA, 21 nt, artificial
  Oligomer
agauggaggaauuaggcaaag

SEQ ID NO: 4114 - RNA, 21 nt, artificial
  Oligomer
gccuuuuccugguucaacaac

SEQ ID NO: 4115 - RNA, 21 nt, artificial
  Oligomer
cacaaccucaaaacaaaaaag

SEQ ID NO: 4116 - RNA, 21 nt, artificial
  Oligomer
guuguuaugcacccauccaaa

SEQ ID NO: 4117 - RNA, 21 nt, artificial
  Oligomer
acuggagugaucaugacaaua

SEQ ID NO: 4118 - RNA, 21 nt, artificial
  Oligomer
cgaaacacgacaguggaguau

SEQ ID NO: 4119 - RNA, 21 nt, artificial
  Oligomer
aggccgacaaauacuacuaca

SEQ ID NO: 4120 - RNA, 21 nt, artificial
  Oligomer
ugagaaggccgacaaauacua

SEQ ID NO: 4121 - RNA, 21 nt, artificial
  Oligomer
gaaggaaggcggaauaaacuu

SEQ ID NO: 4122 - RNA, 21 nt, artificial
  Oligomer
guuguuugguuagggcugaau

SEQ ID NO: 4123 - RNA, 21 nt, artificial
  Oligomer
cagugugaacagcaauuuauu

SEQ ID NO: 4124 - RNA, 21 nt, artificial
  Oligomer
cuaaguagggugacuuuuuaa

SEQ ID NO: 4125 - RNA, 21 nt, artificial
  Oligomer
ggugauuuuaucaauuccagu

SEQ ID NO: 4126 - RNA, 21 nt, artificial
  Oligomer
uggugguucagaguuauacaa

SEQ ID NO: 4127 - RNA, 21 nt, artificial
  Oligomer
guuuggugguucagaguuaua

SEQ ID NO: 4128 - RNA, 21 nt, artificial
  Oligomer
agagguuuggugguucagagu

SEQ ID NO: 4129 - RNA, 21 nt, artificial
  Oligomer
gaaguucuuaaagcccaugga

SEQ ID NO: 4130 - RNA, 21 nt, artificial
  Oligomer
ucugaaguucuuaaagcccau

SEQ ID NO: 4131 - RNA, 21 nt, artificial
  Oligomer
agcaacuuaagaacuucugaa

SEQ ID NO: 4132 - RNA, 21 nt, artificial
  Oligomer
ucagcaacuuaagaacuucug

SEQ ID NO: 4133 - RNA, 21 nt, artificial
  Oligomer
ucccugguauucuuuuuuuga

SEQ ID NO: 4134 - RNA, 21 nt, artificial
  Oligomer
cucccugguauucuuuuuuug

SEQ ID NO: 4135 - RNA, 21 nt, artificial
  Oligomer
ugacucccugguauucuuuuu

SEQ ID NO: 4136 - RNA, 21 nt, artificial
  Oligomer
cuugacucccugguauucuuu

SEQ ID NO: 4137 - RNA, 21 nt, artificial
  Oligomer
ccuugacucccugguauucuu

SEQ ID NO: 4138 - RNA, 21 nt, artificial
  Oligomer
ucagguuugagcagucacuuu

SEQ ID NO: 4139 - RNA, 21 nt, artificial
  Oligomer
gucagguuugagcagucacuu

SEQ ID NO: 4140 - RNA, 21 nt, artificial
  Oligomer
uuauaggaauaaggacgguaa

SEQ ID NO: 4141 - RNA, 21 nt, artificial
  Oligomer
guuauaggaauaaggacggua

SEQ ID NO: 4142 - RNA, 21 nt, artificial
  Oligomer
agaaaaucucauaagggcuuu

SEQ ID NO: 4143 - RNA, 21 nt, artificial
  Oligomer
uccauuccugaaggaccucuc

SEQ ID NO: 4144 - RNA, 21 nt, artificial
  Oligomer
aucuucuauauccuuggcuua

SEQ ID NO: 4145 - RNA, 21 nt, artificial
  Oligomer
gccuaucucaugaugagaaaa

SEQ ID NO: 4146 - RNA, 21 nt, artificial
  Oligomer
gcugguggccuauaugaucug

SEQ ID NO: 4147 - RNA, 21 nt, artificial
  Oligomer
cacacugagaaagcaauugga

SEQ ID NO: 4148 - RNA, 21 nt, artificial
  Oligomer
gucugcucucugcuugaauuu

SEQ ID NO: 4149 - RNA, 21 nt, artificial
  Oligomer
agagaaggaaggcggaauaaa

SEQ ID NO: 4150 - RNA, 21 nt, artificial
  Oligomer
uccagugugaacagcaauuua

SEQ ID NO: 4151 - RNA, 21 nt, artificial
  Oligomer
ccugaguuuugguuuguaauc

SEQ ID NO: 4152 - RNA, 21 nt, artificial
  Oligomer
uguuaccaucuccugaguuuu

SEQ ID NO: 4153 - RNA, 21 nt, artificial
  Oligomer
guguuaccaucuccugaguuu

SEQ ID NO: 4154 - RNA, 21 nt, artificial
  Oligomer
aguguuaccaucuccugaguu

SEQ ID NO: 4155 - RNA, 21 nt, artificial
  Oligomer
caguguuaccaucuccugagu

SEQ ID NO: 4156 - RNA, 21 nt, artificial
  Oligomer
aucccaggugauuuuaucaau

SEQ ID NO: 4157 - RNA, 21 nt, artificial
  Oligomer
agguuuggugguucagaguua

SEQ ID NO: 4158 - RNA, 21 nt, artificial
  Oligomer
gcagagguuuggugguucaga

SEQ ID NO: 4159 - RNA, 21 nt, artificial
  Oligomer
acucccugguauucuuuuuuu

SEQ ID NO: 4160 - RNA, 21 nt, artificial
  Oligomer
gccuugacucccugguauucu

SEQ ID NO: 4161 - RNA, 21 nt, artificial
  Oligomer
cucgucagguuugagcaguca

SEQ ID NO: 4162 - RNA, 21 nt, artificial
  Oligomer
cgguaaucugcauuuugucuc

SEQ ID NO: 4163 - RNA, 21 nt, artificial
  Oligomer
ggcaaaguggguuuucuaaac

SEQ ID NO: 4164 - RNA, 21 nt, artificial
  Oligomer
gggcuuucgaacaacaauauu

SEQ ID NO: 4165 - RNA, 21 nt, artificial
  Oligomer
ggacaaauguuccauuccuga

SEQ ID NO: 4166 - RNA, 21 nt, artificial
  Oligomer
cucaccaccuuuuuaucuucu

SEQ ID NO: 4167 - RNA, 21 nt, artificial
  Oligomer
agcuacugaguucauccggag

SEQ ID NO: 4168 - RNA, 21 nt, artificial
  Oligomer
ugcucucugcuugaauuuuaa

SEQ ID NO: 4169 - RNA, 21 nt, artificial
  Oligomer
cugcucucugcuugaauuuua

SEQ ID NO: 4170 - RNA, 21 nt, artificial
  Oligomer
guacauguuuacugucacuuu

SEQ ID NO: 4171 - RNA, 21 nt, artificial
  Oligomer
agauuuccuaaguagggugac

SEQ ID NO: 4172 - RNA, 21 nt, artificial
  Oligomer
agcagagguuuggugguucag

SEQ ID NO: 4173 - RNA, 21 nt, artificial
  Oligomer
ugacuguagcaaggcuugaua

SEQ ID NO: 4174 - RNA, 21 nt, artificial
  Oligomer
gcccauggauccuuucucaga

SEQ ID NO: 4175 - RNA, 21 nt, artificial
  Oligomer
aaguucuuaaagcccauggau

SEQ ID NO: 4176 - RNA, 21 nt, artificial
  Oligomer
ugucucuuuguaucuucagua

SEQ ID NO: 4177 - RNA, 21 nt, artificial
  Oligomer
ucugcauuuugucucuuugua

SEQ ID NO: 4178 - RNA, 21 nt, artificial
  Oligomer
gggacaaugaguuuucuacaa

SEQ ID NO: 4179 - RNA, 21 nt, artificial
  Oligomer
ugggacagcaauauuguuggu

SEQ ID NO: 4180 - RNA, 21 nt, artificial
  Oligomer
uuaggcaaaguggguuuucua

SEQ ID NO: 4181 - RNA, 21 nt, artificial
  Oligomer
gaacaggagauggaggaauua

SEQ ID NO: 4182 - RNA, 21 nt, artificial
  Oligomer
agaugugggaugaucgugacu

SEQ ID NO: 4183 - RNA, 21 nt, artificial
  Oligomer
gagaugugggaugaucgugac

SEQ ID NO: 4184 - RNA, 21 nt, artificial
  Oligomer
guucauccggaggaguuauuu

SEQ ID NO: 4185 - RNA, 21 nt, artificial
  Oligomer
gugucgcaaucugcuguccuu

SEQ ID NO: 4186 - RNA, 21 nt, artificial
  Oligomer
gagguuuggugguucagaguu

SEQ ID NO: 4187 - RNA, 21 nt, artificial
  Oligomer
agcccauggauccuuucucag

SEQ ID NO: 4188 - RNA, 21 nt, artificial
  Oligomer
cugaaguucuuaaagcccaug

SEQ ID NO: 4189 - RNA, 21 nt, artificial
  Oligomer
gcuucagcaacuuaagaacuu

SEQ ID NO: 4190 - RNA, 21 nt, artificial
  Oligomer
ucgucagguuugagcagucac

SEQ ID NO: 4191 - RNA, 21 nt, artificial
  Oligomer
aggcaaaguggguuuucuaaa

SEQ ID NO: 4192 - RNA, 21 nt, artificial
  Oligomer
cuugaaauccaucugguacaa

SEQ ID NO: 4193 - RNA, 21 nt, artificial
  Oligomer
ugaacaagcguggcuucagca

SEQ ID NO: 4194 - RNA, 21 nt, artificial
  Oligomer
ccagcagaagguugugauuac

SEQ ID NO: 4195 - RNA, 21 nt, artificial
  Oligomer
gcgcuggacaaauguuccauu

SEQ ID NO: 4196 - RNA, 21 nt, artificial
  Oligomer
agccuaucucaugaugagaaa

SEQ ID NO: 4197 - RNA, 21 nt, artificial
  Oligomer
cugauccugcuuccugugugu

SEQ ID NO: 4198 - RNA, 21 nt, artificial
  Oligomer
gcaaggcuugauagcagaggu

SEQ ID NO: 4199 - RNA, 21 nt, artificial
  Oligomer
ggauccuuucucagaaaaaua

SEQ ID NO: 4200 - RNA, 21 nt, artificial
  Oligomer
gggagaccaaugugggacaau

SEQ ID NO: 4201 - RNA, 21 nt, artificial
  Oligomer
gacaucgugacaggucugaaa

SEQ ID NO: 4202 - RNA, 21 nt, artificial
  Oligomer
ccauccaaaguuuuggaauug

SEQ ID NO: 4203 - RNA, 21 nt, artificial
  Oligomer
caaucugcuguccuuccugag

SEQ ID NO: 4204 - RNA, 21 nt, artificial
  Oligomer
gcaaucugcuguccuuccuga

SEQ ID NO: 4205 - RNA, 21 nt, artificial
  Oligomer
ggcggaauaaacuuauucauu

SEQ ID NO: 4206 - RNA, 21 nt, artificial
  Oligomer
ccacagaagauuuccuaagua

SEQ ID NO: 4207 - RNA, 21 nt, artificial
  Oligomer
guucuuaaaguucugaaguuc

SEQ ID NO: 4208 - RNA, 21 nt, artificial
  Oligomer
gauauuccagucuggauccua

SEQ ID NO: 4209 - RNA, 21 nt, artificial
  Oligomer
gcgcaaaugcugucaccgaua

SEQ ID NO: 4210 - RNA, 21 nt, artificial
  Oligomer
gcagcauuaaacuuugacaag

SEQ ID NO: 4211 - RNA, 21 nt, artificial
  Oligomer
gaaaaucucauaagggcuuuc

SEQ ID NO: 4212 - RNA, 21 nt, artificial
  Oligomer
cgcuggacaaauguuccauuc

SEQ ID NO: 4213 - RNA, 21 nt, artificial
  Oligomer
gaguucauccggaggaguuau

SEQ ID NO: 4214 - RNA, 21 nt, artificial
  Oligomer
cuaucucaugaugagaaaaag

SEQ ID NO: 4215 - RNA, 21 nt, artificial
  Oligomer
ccuaucucaugaugagaaaaa

SEQ ID NO: 4216 - RNA, 21 nt, artificial
  Oligomer
ccuguuuaacuuugacugcua

SEQ ID NO: 4217 - RNA, 21 nt, artificial
  Oligomer
gaauuuuaacagcacgcugau

SEQ ID NO: 4218 - RNA, 21 nt, artificial
  Oligomer
ccacugguuuucaguuuuguu

SEQ ID NO: 4219 - RNA, 21 nt, artificial
  Oligomer
ugggacaaugaguuuucuaca

SEQ ID NO: 4220 - RNA, 21 nt, artificial
  Oligomer
ugugggacaaugaguuuucua

SEQ ID NO: 4221 - RNA, 21 nt, artificial
  Oligomer
auaagggcuuucgaacaacaa

SEQ ID NO: 4222 - RNA, 21 nt, artificial
  Oligomer
ucauaagggcuuucgaacaac

SEQ ID NO: 4223 - RNA, 21 nt, artificial
  Oligomer
cagaaaaucucauaagggcuu

SEQ ID NO: 4224 - RNA, 21 nt, artificial
  Oligomer
gaggaagauuucuucuccauu

SEQ ID NO: 4225 - RNA, 21 nt, artificial
  Oligomer
uggauccuugcaccggucauu

SEQ ID NO: 4226 - RNA, 21 nt, artificial
  Oligomer
ugaucgugacucccacuguag

SEQ ID NO: 4227 - RNA, 21 nt, artificial
  Oligomer
guggaugccuuccugaaauau

SEQ ID NO: 4228 - RNA, 21 nt, artificial
  Oligomer
ugaguuuucuacaauagcuac

SEQ ID NO: 4229 - RNA, 21 nt, artificial
  Oligomer
cggaugggacagcaauauugu

SEQ ID NO: 4230 - RNA, 21 nt, artificial
  Oligomer
cuggaacaggagauggaggaa

SEQ ID NO: 4231 - RNA, 21 nt, artificial
  Oligomer
agugaggauguuuuccaguau

SEQ ID NO: 4232 - RNA, 21 nt, artificial
  Oligomer
cucauaagggcuuucgaacaa

SEQ ID NO: 4233 - RNA, 21 nt, artificial
  Oligomer
ggaagauuucuucuccauuca

SEQ ID NO: 4234 - RNA, 21 nt, artificial
  Oligomer
cccauccaaaguuuuggaauu

SEQ ID NO: 4235 - RNA, 21 nt, artificial
  Oligomer
ccaagguuguuaugcacccau

SEQ ID NO: 4236 - RNA, 21 nt, artificial
  Oligomer
cgcccuaaguuugaagggcau

SEQ ID NO: 4237 - RNA, 21 nt, artificial
  Oligomer
gguguguguuuuucacaucuu

SEQ ID NO: 4238 - RNA, 21 nt, artificial
  Oligomer
cuguuuaacuuugacugcuau

SEQ ID NO: 4239 - RNA, 21 nt, artificial
  Oligomer
ccuaaguagggugacuuuuua

SEQ ID NO: 4240 - RNA, 21 nt, artificial
  Oligomer
ccaucuccugaguuuugguuu

SEQ ID NO: 4241 - RNA, 21 nt, artificial
  Oligomer
gacuguagcaaggcuugauag

SEQ ID NO: 4242 - RNA, 21 nt, artificial
  Oligomer
gcauucaacuucguuacuuga

SEQ ID NO: 4243 - RNA, 21 nt, artificial
  Oligomer
agguuugagcagucacuuuag

SEQ ID NO: 4244 - RNA, 21 nt, artificial
  Oligomer
ugcagcauuaaacuuugacaa

SEQ ID NO: 4245 - RNA, 21 nt, artificial
  Oligomer
cgaacaacaauauucaccaau

SEQ ID NO: 4246 - RNA, 21 nt, artificial
  Oligomer
gacuggacagaaaaucucaua

SEQ ID NO: 4247 - RNA, 21 nt, artificial
  Oligomer
gcagaagguugugauuaccaa

SEQ ID NO: 4248 - RNA, 21 nt, artificial
  Oligomer
ucuuuugagaugugggaugau

SEQ ID NO: 4249 - RNA, 21 nt, artificial
  Oligomer
gucuuuugagaugugggauga

SEQ ID NO: 4250 - RNA, 21 nt, artificial
  Oligomer
guguguguuuuucacaucuua

SEQ ID NO: 4251 - RNA, 21 nt, artificial
  Oligomer
gcaauuggaucacaaccucac

SEQ ID NO: 4252 - RNA, 21 nt, artificial
  Oligomer
uguggaugccuuccugaaaua

SEQ ID NO: 4253 - RNA, 21 nt, artificial
  Oligomer
uccuaaguagggugacuuuuu

SEQ ID NO: 4254 - RNA, 21 nt, artificial
  Oligomer
cagguuugagcagucacuuua

SEQ ID NO: 4255 - RNA, 21 nt, artificial
  Oligomer
ggaugggacagcaauauuguu

SEQ ID NO: 4256 - RNA, 21 nt, artificial
  Oligomer
gcacagccagugaggauguuu

SEQ ID NO: 4257 - RNA, 21 nt, artificial
  Oligomer
agggcuuucgaacaacaauau

SEQ ID NO: 4258 - RNA, 21 nt, artificial
  Oligomer
gaagauuucuucuccauucau

SEQ ID NO: 4259 - RNA, 21 nt, artificial
  Oligomer
agaggaagauuucuucuccau

SEQ ID NO: 4260 - RNA, 21 nt, artificial
  Oligomer
ggaguaugugacauucaccag

SEQ ID NO: 4261 - RNA, 21 nt, artificial
  Oligomer
aggcggaauaaacuuauucau

SEQ ID NO: 4262 - RNA, 21 nt, artificial
  Oligomer
uuguuucugguuguuugguua

SEQ ID NO: 4263 - RNA, 21 nt, artificial
  Oligomer
cacagaagauuuccuaaguag

SEQ ID NO: 4264 - RNA, 21 nt, artificial
  Oligomer
cccacagaagauuuccuaagu

SEQ ID NO: 4265 - RNA, 21 nt, artificial
  Oligomer
cuccugaguuuugguuuguaa

SEQ ID NO: 4266 - RNA, 21 nt, artificial
  Oligomer
gggugguuaaccacugguuuu

SEQ ID NO: 4267 - RNA, 21 nt, artificial
  Oligomer
ugggugguuaaccacugguuu

SEQ ID NO: 4268 - RNA, 21 nt, artificial
  Oligomer
ucugaaguucuuaaaguucug

SEQ ID NO: 4269 - RNA, 21 nt, artificial
  Oligomer
ggauaagaaugugccucucaa

SEQ ID NO: 4270 - RNA, 21 nt, artificial
  Oligomer
ucacuuuaggauaagaaugug

SEQ ID NO: 4271 - RNA, 21 nt, artificial
  Oligomer
cccaagucuguagugggaguu

SEQ ID NO: 4272 - RNA, 21 nt, artificial
  Oligomer
guggguuuucuaaacuaccgu

SEQ ID NO: 4273 - RNA, 21 nt, artificial
  Oligomer
acuggacagaaaaucucauaa

SEQ ID NO: 4274 - RNA, 21 nt, artificial
  Oligomer
acccauccaaaguuuuggaau

SEQ ID NO: 4275 - RNA, 21 nt, artificial
  Oligomer
gcuggacaaauguuccauucc

SEQ ID NO: 4276 - RNA, 21 nt, artificial
  Oligomer
gcaagugugcagagucuuuug

SEQ ID NO: 4277 - RNA, 21 nt, artificial
  Oligomer
ggauucacggcauugguggaa

SEQ ID NO: 4278 - RNA, 21 nt, artificial
  Oligomer
ccagccuaucucaugaugaga

SEQ ID NO: 4279 - RNA, 21 nt, artificial
  Oligomer
uaaccacugguuuucaguuuu

SEQ ID NO: 4280 - RNA, 21 nt, artificial
  Oligomer
caacuaaucccaggugauuuu

SEQ ID NO: 4281 - RNA, 21 nt, artificial
  Oligomer
cugggugguuaaccacugguu

SEQ ID NO: 4282 - RNA, 21 nt, artificial
  Oligomer
ccauggauccuuucucagaaa

SEQ ID NO: 4283 - RNA, 21 nt, artificial
  Oligomer
gaaguucuuaaaguucugaag

SEQ ID NO: 4284 - RNA, 21 nt, artificial
  Oligomer
cugaaguucuuaaaguucuga

SEQ ID NO: 4285 - RNA, 21 nt, artificial
  Oligomer
gguucaauucuacuucaacaa

SEQ ID NO: 4286 - RNA, 21 nt, artificial
  Oligomer
ccaaugugggacaaugaguuu

SEQ ID NO: 4287 - RNA, 21 nt, artificial
  Oligomer
ggucaugcagcauuaaacuuu

SEQ ID NO: 4288 - RNA, 21 nt, artificial
  Oligomer
ccggaugggacagcaauauug

SEQ ID NO: 4289 - RNA, 21 nt, artificial
  Oligomer
ugcuucuaucuugaaauccau

SEQ ID NO: 4290 - RNA, 21 nt, artificial
  Oligomer
cccucaaucucucuccuggaa

SEQ ID NO: 4291 - RNA, 21 nt, artificial
  Oligomer
gcagaugaacaagcguggcuu

SEQ ID NO: 4292 - RNA, 21 nt, artificial
  Oligomer
ggaauugcagaugaacaagcg

SEQ ID NO: 4293 - RNA, 21 nt, artificial
  Oligomer
gacaaauguuccauuccugaa

SEQ ID NO: 4294 - RNA, 21 nt, artificial
  Oligomer
uggacaaauguuccauuccug

SEQ ID NO: 4295 - RNA, 21 nt, artificial
  Oligomer
gcccuaaguuugaagggcauc

SEQ ID NO: 4296 - RNA, 21 nt, artificial
  Oligomer
guaugugacauucaccagcgu

SEQ ID NO: 4297 - RNA, 21 nt, artificial
  Oligomer
acagcuauucacaucauugca

SEQ ID NO: 4298 - RNA, 21 nt, artificial
  Oligomer
gccuacauacagcuauucaca

SEQ ID NO: 4299 - RNA, 21 nt, artificial
  Oligomer
cugccuacauacagcuauuca

SEQ ID NO: 4300 - RNA, 21 nt, artificial
  Oligomer
ccgcacacugagaaagcaauu

SEQ ID NO: 4301 - RNA, 21 nt, artificial
  Oligomer
cucauuuugcagccgcacacu

SEQ ID NO: 4302 - RNA, 21 nt, artificial
  Oligomer
ucaguuuuguuucugguuguu

SEQ ID NO: 4303 - RNA, 21 nt, artificial
  Oligomer
cccauauaacaccaacagugu

SEQ ID NO: 4304 - RNA, 21 nt, artificial
  Oligomer
gaagauuuccuaaguagggug

SEQ ID NO: 4305 - RNA, 21 nt, artificial
  Oligomer
ccaugacuguagcaaggcuug

SEQ ID NO: 4306 - RNA, 21 nt, artificial
  Oligomer
ucaacuucguuacuugagcuu

SEQ ID NO: 4307 - RNA, 21 nt, artificial
  Oligomer
agaaugugccucucaagccuu

SEQ ID NO: 4308 - RNA, 21 nt, artificial
  Oligomer
ccaccucuugacaaugggaaa

SEQ ID NO: 4309 - RNA, 21 nt, artificial
  Oligomer
uggauccuagaaagguucaau

SEQ ID NO: 4310 - RNA, 21 nt, artificial
  Oligomer
gucaugcagcauuaaacuuug

SEQ ID NO: 4311 - RNA, 21 nt, artificial
  Oligomer
uggguuuucuaaacuaccguc

SEQ ID NO: 4312 - RNA, 21 nt, artificial
  Oligomer
ccuguugacuucccuggaaca

SEQ ID NO: 4313 - RNA, 21 nt, artificial
  Oligomer
gguucaacaaccuguugacuu

SEQ ID NO: 4314 - RNA, 21 nt, artificial
  Oligomer
gaauccggauugcugaaucuu

SEQ ID NO: 4315 - RNA, 21 nt, artificial
  Oligomer
ccuuugcuucuaucuugaaau

SEQ ID NO: 4316 - RNA, 21 nt, artificial
  Oligomer
ccugaaggaccucuccagaau

SEQ ID NO: 4317 - RNA, 21 nt, artificial
  Oligomer
gaacaagcguggcuucagcau

SEQ ID NO: 4318 - RNA, 21 nt, artificial
  Oligomer
gaauugcagaugaacaagcgu

SEQ ID NO: 4319 - RNA, 21 nt, artificial
  Oligomer
gaagguugugauuaccaaggu

SEQ ID NO: 4320 - RNA, 21 nt, artificial
  Oligomer
cgcaagugugcagagucuuuu

SEQ ID NO: 4321 - RNA, 21 nt, artificial
  Oligomer
auagccuugauucucauggua

SEQ ID NO: 4322 - RNA, 21 nt, artificial
  Oligomer
cucuccagccuaucucaugau

SEQ ID NO: 4323 - RNA, 21 nt, artificial
  Oligomer
ucacaucauugcacaccuguu

SEQ ID NO: 4324 - RNA, 21 nt, artificial
  Oligomer
agcuauucacaucauugcaca

SEQ ID NO: 4325 - RNA, 21 nt, artificial
  Oligomer
guggccuauaugaucugccua

SEQ ID NO: 4326 - RNA, 21 nt, artificial
  Oligomer
ggaugccuuccugaaauauga

SEQ ID NO: 4327 - RNA, 21 nt, artificial
  Oligomer
guguacauguuuacugucacu

SEQ ID NO: 4328 - RNA, 21 nt, artificial
  Oligomer
ccauauaacaccaacagugua

SEQ ID NO: 4329 - RNA, 21 nt, artificial
  Oligomer
caaggcuugauagcagagguu

SEQ ID NO: 4330 - RNA, 21 nt, artificial
  Oligomer
gccaugacuguagcaaggcuu

SEQ ID NO: 4331 - RNA, 21 nt, artificial
  Oligomer
auggauccuuucucagaaaaa

SEQ ID NO: 4332 - RNA, 21 nt, artificial
  Oligomer
cauggauccuuucucagaaaa

SEQ ID NO: 4333 - RNA, 21 nt, artificial
  Oligomer
gauaagaaugugccucucaag

SEQ ID NO: 4334 - RNA, 21 nt, artificial
  Oligomer
aggauaagaaugugccucuca

SEQ ID NO: 4335 - RNA, 21 nt, artificial
  Oligomer
ggauccuagaaagguucaauu

SEQ ID NO: 4336 - RNA, 21 nt, artificial
  Oligomer
gagaccaaugugggacaauga

SEQ ID NO: 4337 - RNA, 21 nt, artificial
  Oligomer
gugacaggucugaaacagaaa

SEQ ID NO: 4338 - RNA, 21 nt, artificial
  Oligomer
ggguuuucuaaacuaccgucu

SEQ ID NO: 4339 - RNA, 21 nt, artificial
  Oligomer
ugguucaacaaccuguugacu

SEQ ID NO: 4340 - RNA, 21 nt, artificial
  Oligomer
ugguacaaauuccagugugca

SEQ ID NO: 4341 - RNA, 21 nt, artificial
  Oligomer
ccaucugguacaaauuccagu

SEQ ID NO: 4342 - RNA, 21 nt, artificial
  Oligomer
ccagaauccggauugcugaau

SEQ ID NO: 4343 - RNA, 21 nt, artificial
  Oligomer
accucuccagaauccggauug

SEQ ID NO: 4344 - RNA, 21 nt, artificial
  Oligomer
ucgaacaacaauauucaccaa

SEQ ID NO: 4345 - RNA, 21 nt, artificial
  Oligomer
gcuuucgaacaacaauauuca

SEQ ID NO: 4346 - RNA, 21 nt, artificial
  Oligomer
uccauucauauccgagcagca

SEQ ID NO: 4347 - RNA, 21 nt, artificial
  Oligomer
ccagaggaagauuucuucucc

SEQ ID NO: 4348 - RNA, 21 nt, artificial
  Oligomer
cuggaauggcauccuuuuacu

SEQ ID NO: 4349 - RNA, 21 nt, artificial
  Oligomer
cucuccuggaauggcauccuu

SEQ ID NO: 4350 - RNA, 21 nt, artificial
  Oligomer
uuaugcacccauccaaaguuu

SEQ ID NO: 4351 - RNA, 21 nt, artificial
  Oligomer
aagguugugauuaccaagguu

SEQ ID NO: 4352 - RNA, 21 nt, artificial
  Oligomer
cagaagguugugauuaccaag

SEQ ID NO: 4353 - RNA, 21 nt, artificial
  Oligomer
guuuuaccgcucccagcagaa

SEQ ID NO: 4354 - RNA, 21 nt, artificial
  Oligomer
ugcgcuggacaaauguuccau

SEQ ID NO: 4355 - RNA, 21 nt, artificial
  Oligomer
gcaugaaugagagucauccuc

SEQ ID NO: 4356 - RNA, 21 nt, artificial
  Oligomer
ucugguauacucaccaccuuu

SEQ ID NO: 4357 - RNA, 21 nt, artificial
  Oligomer
ucaugguaacuucagcuacug

SEQ ID NO: 4358 - RNA, 21 nt, artificial
  Oligomer
gccuugauucucaugguaacu

SEQ ID NO: 4359 - RNA, 21 nt, artificial
  Oligomer
uagccuugauucucaugguaa

SEQ ID NO: 4360 - RNA, 21 nt, artificial
  Oligomer
gacaauagccuugauucucau

SEQ ID NO: 4361 - RNA, 21 nt, artificial
  Oligomer
gaaacacgacaguggaguaug

SEQ ID NO: 4362 - RNA, 21 nt, artificial
  Oligomer
agguguguguuuuucacaucu

SEQ ID NO: 4363 - RNA, 21 nt, artificial
  Oligomer
ugaucugccuacauacagcua

SEQ ID NO: 4364 - RNA, 21 nt, artificial
  Oligomer
ccacaagcugguggccuauau

SEQ ID NO: 4365 - RNA, 21 nt, artificial
  Oligomer
cggaauaaacuuauucauucc

SEQ ID NO: 4366 - RNA, 21 nt, artificial
  Oligomer
accacugguuuucaguuuugu

SEQ ID NO: 4367 - RNA, 21 nt, artificial
  Oligomer
uguacauguuuacugucacuu

SEQ ID NO: 4368 - RNA, 21 nt, artificial
  Oligomer
ucuccugaguuuugguuugua

SEQ ID NO: 4369 - RNA, 21 nt, artificial
  Oligomer
uaaaucuuucuggacagccau

SEQ ID NO: 4370 - RNA, 21 nt, artificial
  Oligomer
uggauccuuucucagaaaaau

SEQ ID NO: 4371 - RNA, 21 nt, artificial
  Oligomer
cgauauuccagucuggauccu

SEQ ID NO: 4372 - RNA, 21 nt, artificial
  Oligomer
ccgauauuccagucuggaucc

SEQ ID NO: 4373 - RNA, 21 nt, artificial
  Oligomer
cgcaaaugcugucaccgauau

SEQ ID NO: 4374 - RNA, 21 nt, artificial
  Oligomer
ugcgcaaaugcugucaccgau

SEQ ID NO: 4375 - RNA, 21 nt, artificial
  Oligomer
ucaugcagcauuaaacuuuga

SEQ ID NO: 4376 - RNA, 21 nt, artificial
  Oligomer
gacaggugccuuuuccugguu

SEQ ID NO: 4377 - RNA, 21 nt, artificial
  Oligomer
cugguacaaauuccagugugc

SEQ ID NO: 4378 - RNA, 21 nt, artificial
  Oligomer
agaauccggauugcugaaucu

SEQ ID NO: 4379 - RNA, 21 nt, artificial
  Oligomer
cucuccagaauccggauugcu

SEQ ID NO: 4380 - RNA, 21 nt, artificial
  Oligomer
ggcuuucgaacaacaauauuc

SEQ ID NO: 4381 - RNA, 21 nt, artificial
  Oligomer
cugaaggaccucuccagaauc

SEQ ID NO: 4382 - RNA, 21 nt, artificial
  Oligomer
ggacuggacagaaaaucucau

SEQ ID NO: 4383 - RNA, 21 nt, artificial
  Oligomer
ggaauggcauccuuuuacuuu

SEQ ID NO: 4384 - RNA, 21 nt, artificial
  Oligomer
uccuggaauggcauccuuuua

SEQ ID NO: 4385 - RNA, 21 nt, artificial
  Oligomer
caagguuguuaugcacccauc

SEQ ID NO: 4386 - RNA, 21 nt, artificial
  Oligomer
cugugaaaggauccuccgguu

SEQ ID NO: 4387 - RNA, 21 nt, artificial
  Oligomer
cucgcaagugugcagagucuu

SEQ ID NO: 4388 - RNA, 21 nt, artificial
  Oligomer
agcacaguucuguccagagaa

SEQ ID NO: 4389 - RNA, 21 nt, artificial
  Oligomer
ugguauacucaccaccuuuuu

SEQ ID NO: 4390 - RNA, 21 nt, artificial
  Oligomer
cugguauacucaccaccuuuu

SEQ ID NO: 4391 - RNA, 21 nt, artificial
  Oligomer
ugaguucauccggaggaguua

SEQ ID NO: 4392 - RNA, 21 nt, artificial
  Oligomer
agugaucaugacaauagccuu

SEQ ID NO: 4393 - RNA, 21 nt, artificial
  Oligomer
cuggucucacuggagugauca

SEQ ID NO: 4394 - RNA, 21 nt, artificial
  Oligomer
aucugccuacauacagcuauu

SEQ ID NO: 4395 - RNA, 21 nt, artificial
  Oligomer
ggccuauaugaucugccuaca

SEQ ID NO: 4396 - RNA, 21 nt, artificial
  Oligomer
agcaauuggaucacaaccuca

SEQ ID NO: 4397 - RNA, 21 nt, artificial
  Oligomer
aaacuuauucauucccaggaa

SEQ ID NO: 4398 - RNA, 21 nt, artificial
  Oligomer
agcgucugcucucugcuugaa

SEQ ID NO: 4399 - RNA, 21 nt, artificial
  Oligomer
cacaagaaaaauccuuggguc

SEQ ID NO: 4400 - RNA, 21 nt, artificial
  Oligomer
gccuuccugaaauaugagaag

SEQ ID NO: 4401 - RNA, 21 nt, artificial
  Oligomer
uucaguuuuguuucugguugu

SEQ ID NO: 4402 - RNA, 21 nt, artificial
  Oligomer
aacuaaucccaggugauuuua

SEQ ID NO: 4403 - RNA, 21 nt, artificial
  Oligomer
guagcaaggcuugauagcaga

SEQ ID NO: 4404 - RNA, 21 nt, artificial
  Oligomer
gcaacuuaagaacuucugaag

SEQ ID NO: 4405 - RNA, 21 nt, artificial
  Oligomer
ucguuacuugagcuucagcaa

SEQ ID NO: 4406 - RNA, 21 nt, artificial
  Oligomer
ucaagccuugacucccuggua

SEQ ID NO: 4407 - RNA, 21 nt, artificial
  Oligomer
agaaagguucaauucuacuuc

SEQ ID NO: 4408 - RNA, 21 nt, artificial
  Oligomer
cuggauccuagaaagguucaa

SEQ ID NO: 4409 - RNA, 21 nt, artificial
  Oligomer
cugucaccgauauuccagucu

SEQ ID NO: 4410 - RNA, 21 nt, artificial
  Oligomer
uggcaaagagccugcgcaaau

SEQ ID NO: 4411 - RNA, 21 nt, artificial
  Oligomer
gcuccaaaccaccucuugaca

SEQ ID NO: 4412 - RNA, 21 nt, artificial
  Oligomer
ggagaccaaugugggacaaug

SEQ ID NO: 4413 - RNA, 21 nt, artificial
  Oligomer
cugaaucuucccuguugccua

SEQ ID NO: 4414 - RNA, 21 nt, artificial
  Oligomer
ccggauugcugaaucuucccu

SEQ ID NO: 4415 - RNA, 21 nt, artificial
  Oligomer
uccugguucaacaaccuguug

SEQ ID NO: 4416 - RNA, 21 nt, artificial
  Oligomer
uuccugguucaacaaccuguu

SEQ ID NO: 4417 - RNA, 21 nt, artificial
  Oligomer
auauucaccaauucccaggau

SEQ ID NO: 4418 - RNA, 21 nt, artificial
  Oligomer
cuggacagaaaaucucauaag

SEQ ID NO: 4419 - RNA, 21 nt, artificial
  Oligomer
gggacuggacagaaaaucuca

SEQ ID NO: 4420 - RNA, 21 nt, artificial
  Oligomer
ccauucauauccgagcagcag

SEQ ID NO: 4421 - RNA, 21 nt, artificial
  Oligomer
cagaggaagauuucuucucca

SEQ ID NO: 4422 - RNA, 21 nt, artificial
  Oligomer
ccucugcuccagaggaagauu

SEQ ID NO: 4423 - RNA, 21 nt, artificial
  Oligomer
uggaauggcauccuuuuacuu

SEQ ID NO: 4424 - RNA, 21 nt, artificial
  Oligomer
cuccuggaauggcauccuuuu

SEQ ID NO: 4425 - RNA, 21 nt, artificial
  Oligomer
ucuccuggaauggcauccuuu

SEQ ID NO: 4426 - RNA, 21 nt, artificial
  Oligomer
cccugagucuuggaaguggau

SEQ ID NO: 4427 - RNA, 21 nt, artificial
  Oligomer
guaggcgcccuaaguuugaag

SEQ ID NO: 4428 - RNA, 21 nt, artificial
  Oligomer
gucucacuggagugaucauga

SEQ ID NO: 4429 - RNA, 21 nt, artificial
  Oligomer
uggucucacuggagugaucau

SEQ ID NO: 4430 - RNA, 21 nt, artificial
  Oligomer
uuccacaagcugguggccuau

SEQ ID NO: 4431 - RNA, 21 nt, artificial
  Oligomer
ggaauaaacuuauucauuccc

SEQ ID NO: 4432 - RNA, 21 nt, artificial
  Oligomer
gcggaauaaacuuauucauuc

SEQ ID NO: 4433 - RNA, 21 nt, artificial
  Oligomer
cacuuuugauauggucuuauc

SEQ ID NO: 4434 - RNA, 21 nt, artificial
  Oligomer
gguuaaccacugguuuucagu

SEQ ID NO: 4435 - RNA, 21 nt, artificial
  Oligomer
uccugaguuuugguuuguaau

SEQ ID NO: 4436 - RNA, 21 nt, artificial
  Oligomer
agaguuauacaacuaauccca

SEQ ID NO: 4437 - RNA, 21 nt, artificial
  Oligomer
ggaaacugggugguuaaccac

SEQ ID NO: 4438 - RNA, 21 nt, artificial
  Oligomer
acuguaaaucuuucuggacag

SEQ ID NO: 4439 - RNA, 21 nt, artificial
  Oligomer
cuagaaagguucaauucuacu

SEQ ID NO: 4440 - RNA, 21 nt, artificial
  Oligomer
ccuagaaagguucaauucuac

SEQ ID NO: 4441 - RNA, 21 nt, artificial
  Oligomer
ccaaaccaccucuugacaaug

SEQ ID NO: 4442 - RNA, 21 nt, artificial
  Oligomer
gggaguuuucuuauguggccc

SEQ ID NO: 4443 - RNA, 21 nt, artificial
  Oligomer
guugccuagaagggcuccaaa

SEQ ID NO: 4444 - RNA, 21 nt, artificial
  Oligomer
cugaaacagaaaaccuccuuu

SEQ ID NO: 4445 - RNA, 21 nt, artificial
  Oligomer
agcauuaaacuuugacaaggc

SEQ ID NO: 4446 - RNA, 21 nt, artificial
  Oligomer
gguuuucuaaacuaccgucuc

SEQ ID NO: 4447 - RNA, 21 nt, artificial
  Oligomer
cuauuucuacuggaucugcag

SEQ ID NO: 4448 - RNA, 21 nt, artificial
  Oligomer
gcuucuaucuugaaauccauc

SEQ ID NO: 4449 - RNA, 21 nt, artificial
  Oligomer
ccagugaggauguuuuccagu

SEQ ID NO: 4450 - RNA, 21 nt, artificial
  Oligomer
cccaggauugaaguggauggu

SEQ ID NO: 4451 - RNA, 21 nt, artificial
  Oligomer
gcacccauccaaaguuuugga

SEQ ID NO: 4452 - RNA, 21 nt, artificial
  Oligomer
ugugaaaggauccuccgguuu

SEQ ID NO: 4453 - RNA, 21 nt, artificial
  Oligomer
ucgcaagugugcagagucuuu

SEQ ID NO: 4454 - RNA, 21 nt, artificial
  Oligomer
agagucauccucgcaagugug

SEQ ID NO: 4455 - RNA, 21 nt, artificial
  Oligomer
agagcaugaaugagagucauc

SEQ ID NO: 4456 - RNA, 21 nt, artificial
  Oligomer
gagagcaugaaugagagucau

SEQ ID NO: 4457 - RNA, 21 nt, artificial
  Oligomer
cacuggagugaucaugacaau

SEQ ID NO: 4458 - RNA, 21 nt, artificial
  Oligomer
gguucuuggcuaaaucccauc

SEQ ID NO: 4459 - RNA, 21 nt, artificial
  Oligomer
cagccuaucucaugaugagaa

SEQ ID NO: 4460 - RNA, 21 nt, artificial
  Oligomer
caagaaaaauccuugggucaa

SEQ ID NO: 4461 - RNA, 21 nt, artificial
  Oligomer
acaagaaaaauccuuggguca

SEQ ID NO: 4462 - RNA, 21 nt, artificial
  Oligomer
aguguacauguuuacugucac

SEQ ID NO: 4463 - RNA, 21 nt, artificial
  Oligomer
acaguguacauguuuacuguc

SEQ ID NO: 4464 - RNA, 21 nt, artificial
  Oligomer
acaccaacaguguacauguuu

SEQ ID NO: 4465 - RNA, 21 nt, artificial
  Oligomer
acaacuaaucccaggugauuu

SEQ ID NO: 4466 - RNA, 21 nt, artificial
  Oligomer
uggacagccaugacuguagca

SEQ ID NO: 4467 - RNA, 21 nt, artificial
  Oligomer
ccagucuggauccuagaaagg

SEQ ID NO: 4468 - RNA, 21 nt, artificial
  Oligomer
cuccaaaccaccucuugacaa

SEQ ID NO: 4469 - RNA, 21 nt, artificial
  Oligomer
gacaggucugaaacagaaaac

SEQ ID NO: 4470 - RNA, 21 nt, artificial
  Oligomer
ugacaggucugaaacagaaaa

SEQ ID NO: 4471 - RNA, 21 nt, artificial
  Oligomer
ugacaucgugacaggucugaa

SEQ ID NO: 4472 - RNA, 21 nt, artificial
  Oligomer
gaaucuucccuguugccuaga

SEQ ID NO: 4473 - RNA, 21 nt, artificial
  Oligomer
ggacagcaauauuguugguca

SEQ ID NO: 4474 - RNA, 21 nt, artificial
  Oligomer
accuguugacuucccuggaac

SEQ ID NO: 4475 - RNA, 21 nt, artificial
  Oligomer
cugguucaacaaccuguugac

SEQ ID NO: 4476 - RNA, 21 nt, artificial
  Oligomer
ugugcagaccacaaccucaaa

SEQ ID NO: 4477 - RNA, 21 nt, artificial
  Oligomer
cagaauccggauugcugaauc

SEQ ID NO: 4478 - RNA, 21 nt, artificial
  Oligomer
gccagugaggauguuuuccag

SEQ ID NO: 4479 - RNA, 21 nt, artificial
  Oligomer
ggauugaaguggauggucccu

SEQ ID NO: 4480 - RNA, 21 nt, artificial
  Oligomer
cuccagaggaagauuucuucu

SEQ ID NO: 4481 - RNA, 21 nt, artificial
  Oligomer
ccaaaguuuuggaauugcaga

SEQ ID NO: 4482 - RNA, 21 nt, artificial
  Oligomer
uccaaaguuuuggaauugcag

SEQ ID NO: 4483 - RNA, 21 nt, artificial
  Oligomer
cacccauccaaaguuuuggaa

SEQ ID NO: 4484 - RNA, 21 nt, artificial
  Oligomer
agcagaagguugugauuacca

SEQ ID NO: 4485 - RNA, 21 nt, artificial
  Oligomer
gugaaaggauccuccgguuuu

SEQ ID NO: 4486 - RNA, 21 nt, artificial
  Oligomer
gcacaguucuguccagagaag

SEQ ID NO: 4487 - RNA, 21 nt, artificial
  Oligomer
cacuguaggcgcccuaaguuu

SEQ ID NO: 4488 - RNA, 21 nt, artificial
  Oligomer
ugaaugagagucauccucgca

SEQ ID NO: 4489 - RNA, 21 nt, artificial
  Oligomer
cugaguucauccggaggaguu

SEQ ID NO: 4490 - RNA, 21 nt, artificial
  Oligomer
gaucaugacaauagccuugau

SEQ ID NO: 4491 - RNA, 21 nt, artificial
  Oligomer
cugcuauagcagaagccgaca

SEQ ID NO: 4492 - RNA, 21 nt, artificial
  Oligomer
cuauaugaucugccuacauac

SEQ ID NO: 4493 - RNA, 21 nt, artificial
  Oligomer
acuuauucauucccaggaacu

SEQ ID NO: 4494 - RNA, 21 nt, artificial
  Oligomer
agccgcacacugagaaagcaa

SEQ ID NO: 4495 - RNA, 21 nt, artificial
  Oligomer
cugcuuccugugugucgcaau

SEQ ID NO: 4496 - RNA, 21 nt, artificial
  Oligomer
accaacaguguacauguuuac

SEQ ID NO: 4497 - RNA, 21 nt, artificial
  Oligomer
gugguuaaccacugguuuuca

SEQ ID NO: 4498 - RNA, 21 nt, artificial
  Oligomer
ccaggugauuuuaucaauucc

SEQ ID NO: 4499 - RNA, 21 nt, artificial
  Oligomer
ccuuucucagaaaaauaacug

SEQ ID NO: 4500 - RNA, 21 nt, artificial
  Oligomer
cccauggauccuuucucagaa

SEQ ID NO: 4501 - RNA, 21 nt, artificial
  Oligomer
gggaaacugggugguuaacca

SEQ ID NO: 4502 - RNA, 21 nt, artificial
  Oligomer
uuacuugagcuucagcaacuu

SEQ ID NO: 4503 - RNA, 21 nt, artificial
  Oligomer
uccuagaaagguucaauucua

SEQ ID NO: 4504 - RNA, 21 nt, artificial
  Oligomer
uggucaugcagcauuaaacuu

SEQ ID NO: 4505 - RNA, 21 nt, artificial
  Oligomer
agcaauauuguuggucaugca

SEQ ID NO: 4506 - RNA, 21 nt, artificial
  Oligomer
cggauugcugaaucuucccug

SEQ ID NO: 4507 - RNA, 21 nt, artificial
  Oligomer
caacaaccuguugacuucccu

SEQ ID NO: 4508 - RNA, 21 nt, artificial
  Oligomer
gaucuauuucuacuggaucug

SEQ ID NO: 4509 - RNA, 21 nt, artificial
  Oligomer
cugauagcacaguucugucca

SEQ ID NO: 4510 - RNA, 21 nt, artificial
  Oligomer
gugcagaccacaaccucaaaa

SEQ ID NO: 4511 - RNA, 21 nt, artificial
  Oligomer
uccagaauccggauugcugaa

SEQ ID NO: 4512 - RNA, 21 nt, artificial
  Oligomer
ccaguaugaaguggcugugcu

SEQ ID NO: 4513 - RNA, 21 nt, artificial
  Oligomer
ucaccaauucccaggauugaa

SEQ ID NO: 4514 - RNA, 21 nt, artificial
  Oligomer
auccaaaguuuuggaauugca

SEQ ID NO: 4515 - RNA, 21 nt, artificial
  Oligomer
gguugugauuaccaagguugu

SEQ ID NO: 4516 - RNA, 21 nt, artificial
  Oligomer
ccuugcaccggucauucuuua

SEQ ID NO: 4517 - RNA, 21 nt, artificial
  Oligomer
agcaugaaugagagucauccu

SEQ ID NO: 4518 - RNA, 21 nt, artificial
  Oligomer
cuauauccuuggcuuagggau

SEQ ID NO: 4519 - RNA, 21 nt, artificial
  Oligomer
gguauacucaccaccuuuuua

SEQ ID NO: 4520 - RNA, 21 nt, artificial
  Oligomer
ggagugaucaugacaauagcc

SEQ ID NO: 4521 - RNA, 21 nt, artificial
  Oligomer
cucacuggagugaucaugaca

SEQ ID NO: 4522 - RNA, 21 nt, artificial
  Oligomer
ggguucuuggcuaaaucccau

SEQ ID NO: 4523 - RNA, 21 nt, artificial
  Oligomer
gguagguguguguuuuucaca

SEQ ID NO: 4524 - RNA, 21 nt, artificial
  Oligomer
gccgcacacugagaaagcaau

SEQ ID NO: 4525 - RNA, 21 nt, artificial
  Oligomer
cugcuugaauuuuaacagcac

SEQ ID NO: 4526 - RNA, 21 nt, artificial
  Oligomer
acacaagaaaaauccuugggu

SEQ ID NO: 4527 - RNA, 21 nt, artificial
  Oligomer
acagaagauuuccuaaguagg

SEQ ID NO: 4528 - RNA, 21 nt, artificial
  Oligomer
gaacuucugaaguucuuaaag

SEQ ID NO: 4529 - RNA, 21 nt, artificial
  Oligomer
caacuuaagaacuucugaagu

SEQ ID NO: 4530 - RNA, 21 nt, artificial
  Oligomer
ugagcuucagcaacuuaagaa

SEQ ID NO: 4531 - RNA, 21 nt, artificial
  Oligomer
caccgauauuccagucuggau

SEQ ID NO: 4532 - RNA, 21 nt, artificial
  Oligomer
ucaccgauauuccagucugga

SEQ ID NO: 4533 - RNA, 21 nt, artificial
  Oligomer
uccaaaccaccucuugacaau

SEQ ID NO: 4534 - RNA, 21 nt, artificial
  Oligomer
accaaugugggacaaugaguu

SEQ ID NO: 4535 - RNA, 21 nt, artificial
  Oligomer
aggugccuuuuccugguucaa

SEQ ID NO: 4536 - RNA, 21 nt, artificial
  Oligomer
gugaggauguuuuccaguaug

SEQ ID NO: 4537 - RNA, 21 nt, artificial
  Oligomer
ccaauucccaggauugaagug

SEQ ID NO: 4538 - RNA, 21 nt, artificial
  Oligomer
accaauucccaggauugaagu

SEQ ID NO: 4539 - RNA, 21 nt, artificial
  Oligomer
cagaugaacaagcguggcuuc

SEQ ID NO: 4540 - RNA, 21 nt, artificial
  Oligomer
accaagguuguuaugcaccca

SEQ ID NO: 4541 - RNA, 21 nt, artificial
  Oligomer
agguugugauuaccaagguug

SEQ ID NO: 4542 - RNA, 21 nt, artificial
  Oligomer
cucccagcagaagguugugau

SEQ ID NO: 4543 - RNA, 21 nt, artificial
  Oligomer
uccuugcaccggucauucuuu

SEQ ID NO: 4544 - RNA, 21 nt, artificial
  Oligomer
ccuugauucucaugguaacuu

SEQ ID NO: 4545 - RNA, 21 nt, artificial
  Oligomer
ucaugacaauagccuugauuc

SEQ ID NO: 4546 - RNA, 21 nt, artificial
  Oligomer
aucaugacaauagccuugauu

SEQ ID NO: 4547 - RNA, 21 nt, artificial
  Oligomer
ugaucaugacaauagccuuga

SEQ ID NO: 4548 - RNA, 21 nt, artificial
  Oligomer
guagguguguguuuuucacau

SEQ ID NO: 4549 - RNA, 21 nt, artificial
  Oligomer
ggguagguguguguuuuucac

SEQ ID NO: 4550 - RNA, 21 nt, artificial
  Oligomer
gguggccuauaugaucugccu

SEQ ID NO: 4551 - RNA, 21 nt, artificial
  Oligomer
caaccucaccuuccacaagcu

SEQ ID NO: 4552 - RNA, 21 nt, artificial
  Oligomer
gaaggcggaauaaacuuauuc

SEQ ID NO: 4553 - RNA, 21 nt, artificial
  Oligomer
ggucuuauccagugugaacag

SEQ ID NO: 4554 - RNA, 21 nt, artificial
  Oligomer
ugauauggucuuauccagugu

SEQ ID NO: 4555 - RNA, 21 nt, artificial
  Oligomer
gucuggauccuagaaagguuc

SEQ ID NO: 4556 - RNA, 21 nt, artificial
  Oligomer
uccagucuggauccuagaaag

SEQ ID NO: 4557 - RNA, 21 nt, artificial
  Oligomer
gcugucaccgauauuccaguc

SEQ ID NO: 4558 - RNA, 21 nt, artificial
  Oligomer
ugggagaccaaugugggacaa

SEQ ID NO: 4559 - RNA, 21 nt, artificial
  Oligomer
ucgugacaggucugaaacaga

SEQ ID NO: 4560 - RNA, 21 nt, artificial
  Oligomer
acaucgugacaggucugaaac

SEQ ID NO: 4561 - RNA, 21 nt, artificial
  Oligomer
acaaggccacugacaucguga

SEQ ID NO: 4562 - RNA, 21 nt, artificial
  Oligomer
ugacaaggccacugacaucgu

SEQ ID NO: 4563 - RNA, 21 nt, artificial
  Oligomer
ugaaaggauccuccgguuuua

SEQ ID NO: 4564 - RNA, 21 nt, artificial
  Oligomer
gucuucugguauacucaccac

SEQ ID NO: 4565 - RNA, 21 nt, artificial
  Oligomer
ugacaauagccuugauucuca

SEQ ID NO: 4566 - RNA, 21 nt, artificial
  Oligomer
ucacuggagugaucaugacaa

SEQ ID NO: 4567 - RNA, 21 nt, artificial
  Oligomer
cacaagcugguggccuauaug

SEQ ID NO: 4568 - RNA, 21 nt, artificial
  Oligomer
cgcacacugagaaagcaauug

SEQ ID NO: 4569 - RNA, 21 nt, artificial
  Oligomer
caggugauuuuaucaauucca

SEQ ID NO: 4570 - RNA, 21 nt, artificial
  Oligomer
gcuugauagcagagguuuggu

SEQ ID NO: 4571 - RNA, 21 nt, artificial
  Oligomer
uacuugagcuucagcaacuua

SEQ ID NO: 4572 - RNA, 21 nt, artificial
  Oligomer
aagccuugacucccugguauu

SEQ ID NO: 4573 - RNA, 21 nt, artificial
  Oligomer
acagaaaaccuccuuugggag

SEQ ID NO: 4574 - RNA, 21 nt, artificial
  Oligomer
cgugacaggucugaaacagaa

SEQ ID NO: 4575 - RNA, 21 nt, artificial
  Oligomer
gggacagcaauauuguugguc

SEQ ID NO: 4576 - RNA, 21 nt, artificial
  Oligomer
ucaccggaugggacagcaaua

SEQ ID NO: 4577 - RNA, 21 nt, artificial
  Oligomer
caggugccuuuuccugguuca

SEQ ID NO: 4578 - RNA, 21 nt, artificial
  Oligomer
cagugaggauguuuuccagua

SEQ ID NO: 4579 - RNA, 21 nt, artificial
  Oligomer
acagccagugaggauguuuuc

SEQ ID NO: 4580 - RNA, 21 nt, artificial
  Oligomer
gguuguuaugcacccauccaa

SEQ ID NO: 4581 - RNA, 21 nt, artificial
  Oligomer
ucaaacagaggagagcaugaa

SEQ ID NO: 4582 - RNA, 21 nt, artificial
  Oligomer
caagcugguggccuauaugau

SEQ ID NO: 4583 - RNA, 21 nt, artificial
  Oligomer
ccaacaguguacauguuuacu

SEQ ID NO: 4584 - RNA, 21 nt, artificial
  Oligomer
ccaguguuaccaucuccugag

SEQ ID NO: 4585 - RNA, 21 nt, artificial
  Oligomer
caagccuugacucccugguau

SEQ ID NO: 4586 - RNA, 21 nt, artificial
  Oligomer
caccggaugggacagcaauau

SEQ ID NO: 4587 - RNA, 21 nt, artificial
  Oligomer
acaggugccuuuuccugguuc

SEQ ID NO: 4588 - RNA, 21 nt, artificial
  Oligomer
ggucaaacagaggagagcaug

SEQ ID NO: 4589 - RNA, 21 nt, artificial
  Oligomer
caccaacaguguacauguuua

SEQ ID NO: 4590 - RNA, 21 nt, artificial
  Oligomer
aggugauuuuaucaauuccag

SEQ ID NO: 4591 - RNA, 21 nt, artificial
  Oligomer
cuuaaagcccauggauccuuu

SEQ ID NO: 4592 - RNA, 21 nt, artificial
  Oligomer
acuuaagaacuucugaaguuc

SEQ ID NO: 4593 - RNA, 21 nt, artificial
  Oligomer
aaaccuccuuugggagaccaa

SEQ ID NO: 4594 - RNA, 21 nt, artificial
  Oligomer
ugaaacagaaaaccuccuuug

SEQ ID NO: 4595 - RNA, 21 nt, artificial
  Oligomer
ucugaaacagaaaaccuccuu

SEQ ID NO: 4596 - RNA, 21 nt, artificial
  Oligomer
caggucugaaacagaaaaccu

SEQ ID NO: 4597 - RNA, 21 nt, artificial
  Oligomer
ugcuccagaggaagauuucuu

SEQ ID NO: 4598 - RNA, 21 nt, artificial
  Oligomer
ucccagcagaagguugugauu

SEQ ID NO: 4599 - RNA, 21 nt, artificial
  Oligomer
ggacagccaugacuguagcaa

SEQ ID NO: 4600 - RNA, 21 nt, artificial
  Oligomer
cuaucuugaaauccaucuggu

SEQ ID NO: 4601 - RNA, 21 nt, artificial
  Oligomer
gaggauguuuuccaguaugaa

SEQ ID NO: 4602 - RNA, 21 nt, artificial
  Oligomer
cuacuacacaagaaaaauccu

SEQ ID NO: 4603 - RNA, 21 nt, artificial
  Oligomer
ugaggauguuuuccaguauga

SEQ ID NO: 4604 - RNA, 21 nt, artificial
  Oligomer
cccagcagaagguugugauua

SEQ ID NO: 4605 - RNA, 21 nt, artificial
  Oligomer
cuguuuguggaugccuuccug

SEQ ID NO: 4606 - RNA, 21 nt, artificial
  Oligomer
ugguuuucaguuuuguuucug

SEQ ID NO: 4607 - RNA, 21 nt, artificial
  Oligomer
gagcuucagcaacuuaagaac

SEQ ID NO: 4608 - RNA, 21 nt, artificial
  Oligomer
gaaaggauccuccgguuuuac

SEQ ID NO: 4609 - RNA, 21 nt, artificial
  Oligomer
gagucuuggaaguggauccuu

SEQ ID NO: 4610 - RNA, 21 nt, artificial
  Oligomer
auccagugugaacagcaauuu

SEQ ID NO: 4611 - RNA, 21 nt, artificial
  Oligomer
agcuucagcaacuuaagaacu

SEQ ID NO: 4612 - RNA, 21 nt, artificial
  Oligomer
gcuccagaggaagauuucuuc

SEQ ID NO: 4613 - RNA, 21 nt, artificial
  Oligomer
ugguaacuucagcuacugagu

SEQ ID NO: 4614 - RNA, 21 nt, artificial
  Oligomer
accggaugggacagcaauauu

SEQ ID NO: 4615 - RNA, 21 nt, artificial
  Oligomer
ugcuggucucacuggagugau

SEQ ID NO: 4616 - RNA, 21 nt, artificial
  Oligomer
cugguuuucaguuuuguuucu

SEQ ID NO: 4617 - RNA, 21 nt, artificial
  Oligomer
uuauccagugugaacagcaau

SEQ ID NO: 4618 - RNA, 21 nt, artificial
  Oligomer
gguuuucaguuuuguuucugg

SEQ ID NO: 4619 - RNA, 21 nt, artificial
  Oligomer
cacugguuuucaguuuuguuu

SEQ ID NO: 4620 - RNA, 21 nt, artificial
  Oligomer
cuccuuugggagaccaaugug

SEQ ID NO: 4621 - RNA, 21 nt, artificial
  Oligomer
gugcugguuggagcaggaauu

SEQ ID NO: 4622 - RNA, 21 nt, artificial
  Oligomer
ggauguuuuccaguaugaagu

SEQ ID NO: 4623 - RNA, 21 nt, artificial
  Oligomer
ugcugguuggagcaggaauug

SEQ ID NO: 4624 - RNA, 21 nt, artificial
  Oligomer
ugagucuuggaaguggauccu

SEQ ID NO: 4625 - RNA, 21 nt, artificial
  Oligomer
aacuucagcuacugaguucau

SEQ ID NO: 4626 - RNA, 21 nt, artificial
  Oligomer
gguaacuucagcuacugaguu

SEQ ID NO: 4627 - RNA, 21 nt, artificial
  Oligomer
uucuuauccuaaagugacugc

SEQ ID NO: 4628 - RNA, 21 nt, artificial
  Oligomer
auuguagaaaacucauugucc

SEQ ID NO: 4629 - RNA, 21 nt, artificial
  Oligomer
auucuuauccuaaagugacug

SEQ ID NO: 4630 - RNA, 21 nt, artificial
  Oligomer
aguuuagaaaacccacuuugc

SEQ ID NO: 4631 - RNA, 21 nt, artificial
  Oligomer
aaacaggaaaacauucagccc

SEQ ID NO: 4632 - RNA, 21 nt, artificial
  Oligomer
caaaagugacaguaaacaugu

SEQ ID NO: 4633 - RNA, 21 nt, artificial
  Oligomer
aauuuguaccagauggauuuc

SEQ ID NO: 4634 - RNA, 21 nt, artificial
  Oligomer
auuccaggagagagauugagg

SEQ ID NO: 4635 - RNA, 21 nt, artificial
  Oligomer
gucaaaguuaaacaggugugc

SEQ ID NO: 4636 - RNA, 21 nt, artificial
  Oligomer
uaaacaggugugcaaugaugu

SEQ ID NO: 4637 - RNA, 21 nt, artificial
  Oligomer
auucaagcagagagcagacgc

SEQ ID NO: 4638 - RNA, 21 nt, artificial
  Oligomer
uaguuuagaaaacccacuuug

SEQ ID NO: 4639 - RNA, 21 nt, artificial
  Oligomer
uuuuuuguuuugagguugugg

SEQ ID NO: 4640 - RNA, 21 nt, artificial
  Oligomer
auuaacaaagauauacugccc

SEQ ID NO: 4641 - RNA, 21 nt, artificial
  Oligomer
acagauauaaagaaugaccgg

SEQ ID NO: 4642 - RNA, 21 nt, artificial
  Oligomer
caaguaacgaaguugaaugca

SEQ ID NO: 4643 - RNA, 21 nt, artificial
  Oligomer
aauaucggugacagcauuugc

SEQ ID NO: 4644 - RNA, 21 nt, artificial
  Oligomer
aaacucccacuacagacuugg

SEQ ID NO: 4645 - RNA, 21 nt, artificial
  Oligomer
gauauaaagaaugaccggugc

SEQ ID NO: 4646 - RNA, 21 nt, artificial
  Oligomer
augaugugaauagcuguaugu

SEQ ID NO: 4647 - RNA, 21 nt, artificial
  Oligomer
auguaggcagaucauauaggc

SEQ ID NO: 4648 - RNA, 21 nt, artificial
  Oligomer
uggaaggugagguugugaucc

SEQ ID NO: 4649 - RNA, 21 nt, artificial
  Oligomer
cuuguguaguaguauuugucg

SEQ ID NO: 4650 - RNA, 21 nt, artificial
  Oligomer
agggccacauaagaaaacucc

SEQ ID NO: 4651 - RNA, 21 nt, artificial
  Oligomer
aaacccacuuugccuaauucc

SEQ ID NO: 4652 - RNA, 21 nt, artificial
  Oligomer
uguuuugagguuguggucugc

SEQ ID NO: 4653 - RNA, 21 nt, artificial
  Oligomer
uggucugcacacuggaauuug

SEQ ID NO: 4654 - RNA, 21 nt, artificial
  Oligomer
aaugccgugaaucccuaagcc

SEQ ID NO: 4655 - RNA, 21 nt, artificial
  Oligomer
agaagacuucaaaauaacucc

SEQ ID NO: 4656 - RNA, 21 nt, artificial
  Oligomer
aaugucacauacuccacuguc

SEQ ID NO: 4657 - RNA, 21 nt, artificial
  Oligomer
ucaaaguuaaacaggugugca

SEQ ID NO: 4658 - RNA, 21 nt, artificial
  Oligomer
gugugcaaugaugugaauagc

SEQ ID NO: 4659 - RNA, 21 nt, artificial
  Oligomer
ucuuauccuaaagugacugcu

SEQ ID NO: 4660 - RNA, 21 nt, artificial
  Oligomer
cuuauccuaaagugacugcuc

SEQ ID NO: 4661 - RNA, 21 nt, artificial
  Oligomer
auaagaaaacucccacuacag

SEQ ID NO: 4662 - RNA, 21 nt, artificial
  Oligomer
uuuuguuuugagguugugguc

SEQ ID NO: 4663 - RNA, 21 nt, artificial
  Oligomer
cacagauauaaagaaugaccg

SEQ ID NO: 4664 - RNA, 21 nt, artificial
  Oligomer
auauaaagaaugaccggugca

SEQ ID NO: 4665 - RNA, 21 nt, artificial
  Oligomer
aagacuucaaaauaacuccuc

SEQ ID NO: 4666 - RNA, 21 nt, artificial
  Oligomer
agacuucaaaauaacuccucc

SEQ ID NO: 4667 - RNA, 21 nt, artificial
  Oligomer
aaacaggugugcaaugaugug

SEQ ID NO: 4668 - RNA, 21 nt, artificial
  Oligomer
aaugaugugaauagcuguaug

SEQ ID NO: 4669 - RNA, 21 nt, artificial
  Oligomer
uugugauccaauugcuuucuc

SEQ ID NO: 4670 - RNA, 21 nt, artificial
  Oligomer
uugucggccuucucauauuuc

SEQ ID NO: 4671 - RNA, 21 nt, artificial
  Oligomer
aauaaguuuauuccgccuucc

SEQ ID NO: 4672 - RNA, 21 nt, artificial
  Oligomer
caaacaggaaaacauucagcc

SEQ ID NO: 4673 - RNA, 21 nt, artificial
  Oligomer
uaguuguauaacucugaacca

SEQ ID NO: 4674 - RNA, 21 nt, artificial
  Oligomer
agauacaaagagacaaaaugc

SEQ ID NO: 4675 - RNA, 21 nt, artificial
  Oligomer
acauaagaaaacucccacuac

SEQ ID NO: 4676 - RNA, 21 nt, artificial
  Oligomer
ggccuugucaaaguuuaaugc

SEQ ID NO: 4677 - RNA, 21 nt, artificial
  Oligomer
auuuguaccagauggauuuca

SEQ ID NO: 4678 - RNA, 21 nt, artificial
  Oligomer
gaggucaaaguaaaaggaugc

SEQ ID NO: 4679 - RNA, 21 nt, artificial
  Oligomer
aggucaaaguaaaaggaugcc

SEQ ID NO: 4680 - RNA, 21 nt, artificial
  Oligomer
uucaucugcaauuccaaaacu

SEQ ID NO: 4681 - RNA, 21 nt, artificial
  Oligomer
aucucaaaagacucugcacac

SEQ ID NO: 4682 - RNA, 21 nt, artificial
  Oligomer
ugacucucauucaugcucucc

SEQ ID NO: 4683 - RNA, 21 nt, artificial
  Oligomer
augucacauacuccacugucg

SEQ ID NO: 4684 - RNA, 21 nt, artificial
  Oligomer
auguugacccaaggauuuuuc

SEQ ID NO: 4685 - RNA, 21 nt, artificial
  Oligomer
uuguguaguaguauuugucgg

SEQ ID NO: 4686 - RNA, 21 nt, artificial
  Oligomer
uguguaguaguauuugucggc

SEQ ID NO: 4687 - RNA, 21 nt, artificial
  Oligomer
uucucauauuucaggaaggca

SEQ ID NO: 4688 - RNA, 21 nt, artificial
  Oligomer
acaaacaggaaaacauucagc

SEQ ID NO: 4689 - RNA, 21 nt, artificial
  Oligomer
aaacaaccagaaacaaaacug

SEQ ID NO: 4690 - RNA, 21 nt, artificial
  Oligomer
uaagaccauaucaaaagugac

SEQ ID NO: 4691 - RNA, 21 nt, artificial
  Oligomer
uuaguuguauaacucugaacc

SEQ ID NO: 4692 - RNA, 21 nt, artificial
  Oligomer
uauuccgccuuccuucucugg

SEQ ID NO: 4693 - RNA, 21 nt, artificial
  Oligomer
uuauccuaaagugacugcuca

SEQ ID NO: 4694 - RNA, 21 nt, artificial
  Oligomer
auacaaagagacaaaaugcag

SEQ ID NO: 4695 - RNA, 21 nt, artificial
  Oligomer
ugaaguagaauugaaccuuuc

SEQ ID NO: 4696 - RNA, 21 nt, artificial
  Oligomer
uuuguuuugagguuguggucu

SEQ ID NO: 4697 - RNA, 21 nt, artificial
  Oligomer
uuucaagauagaagcaaaggg

SEQ ID NO: 4698 - RNA, 21 nt, artificial
  Oligomer
agcccuuaugagauuuucugu

SEQ ID NO: 4699 - RNA, 21 nt, artificial
  Oligomer
cccuuaugagauuuucugucc

SEQ ID NO: 4700 - RNA, 21 nt, artificial
  Oligomer
ucacagauauaaagaaugacc

SEQ ID NO: 4701 - RNA, 21 nt, artificial
  Oligomer
gacuucaaaauaacuccuccg

SEQ ID NO: 4702 - RNA, 21 nt, artificial
  Oligomer
acuucaaaauaacuccuccgg

SEQ ID NO: 4703 - RNA, 21 nt, artificial
  Oligomer
ugaaugucacauacuccacug

SEQ ID NO: 4704 - RNA, 21 nt, artificial
  Oligomer
gaaugucacauacuccacugu

SEQ ID NO: 4705 - RNA, 21 nt, artificial
  Oligomer
cagucaaaguuaaacaggugu

SEQ ID NO: 4706 - RNA, 21 nt, artificial
  Oligomer
agucaaaguuaaacaggugug

SEQ ID NO: 4707 - RNA, 21 nt, artificial
  Oligomer
guugugauccaauugcuuucu

SEQ ID NO: 4708 - RNA, 21 nt, artificial
  Oligomer
aauucaagcagagagcagacg

SEQ ID NO: 4709 - RNA, 21 nt, artificial
  Oligomer
guguaguaguauuugucggcc

SEQ ID NO: 4710 - RNA, 21 nt, artificial
  Oligomer
aagaaaacucccacuacagac

SEQ ID NO: 4711 - RNA, 21 nt, artificial
  Oligomer
aaaacccacuuugccuaauuc

SEQ ID NO: 4712 - RNA, 21 nt, artificial
  Oligomer
uuguugaaccaggaaaaggca

SEQ ID NO: 4713 - RNA, 21 nt, artificial
  Oligomer
uuuguaccagauggauuucaa

SEQ ID NO: 4714 - RNA, 21 nt, artificial
  Oligomer
agcagaggucaaaguaaaagg

SEQ ID NO: 4715 - RNA, 21 nt, artificial
  Oligomer
agauauaaagaaugaccggug

SEQ ID NO: 4716 - RNA, 21 nt, artificial
  Oligomer
ccacaucucaaaagacucugc

SEQ ID NO: 4717 - RNA, 21 nt, artificial
  Oligomer
acaucucaaaagacucugcac

SEQ ID NO: 4718 - RNA, 21 nt, artificial
  Oligomer
gaagacuucaaaauaacuccu

SEQ ID NO: 4719 - RNA, 21 nt, artificial
  Oligomer
ucaucaugagauaggcuggag

SEQ ID NO: 4720 - RNA, 21 nt, artificial
  Oligomer
gagauaggcuggagagaaugg

SEQ ID NO: 4721 - RNA, 21 nt, artificial
  Oligomer
augugaauagcuguauguagg

SEQ ID NO: 4722 - RNA, 21 nt, artificial
  Oligomer
guuaaaauucaagcagagagc

SEQ ID NO: 4723 - RNA, 21 nt, artificial
  Oligomer
gaauugauaaaaucaccuggg

SEQ ID NO: 4724 - RNA, 21 nt, artificial
  Oligomer
aucaccugggauuaguuguau

SEQ ID NO: 4725 - RNA, 21 nt, artificial
  Oligomer
uaacgaaguugaaugcaauca

SEQ ID NO: 4726 - RNA, 21 nt, artificial
  Oligomer
aaaacucccacuacagacuug

SEQ ID NO: 4727 - RNA, 21 nt, artificial
  Oligomer
cugcaugaccaacaauauugc

SEQ ID NO: 4728 - RNA, 21 nt, artificial
  Oligomer
acagggaagauucagcaaucc

SEQ ID NO: 4729 - RNA, 21 nt, artificial
  Oligomer
guuuugagguuguggucugca

SEQ ID NO: 4730 - RNA, 21 nt, artificial
  Oligomer
auaaagaaugaccggugcaag

SEQ ID NO: 4731 - RNA, 21 nt, artificial
  Oligomer
aucccacaucucaaaagacuc

SEQ ID NO: 4732 - RNA, 21 nt, artificial
  Oligomer
cacaucucaaaagacucugca

SEQ ID NO: 4733 - RNA, 21 nt, artificial
  Oligomer
auucaugcucuccucuguuug

SEQ ID NO: 4734 - RNA, 21 nt, artificial
  Oligomer
augccgugaaucccuaagcca

SEQ ID NO: 4735 - RNA, 21 nt, artificial
  Oligomer
auagaagauaaaaagguggug

SEQ ID NO: 4736 - RNA, 21 nt, artificial
  Oligomer
uagaagauaaaaaggugguga

SEQ ID NO: 4737 - RNA, 21 nt, artificial
  Oligomer
cugugagccuuuaagauguga

SEQ ID NO: 4738 - RNA, 21 nt, artificial
  Oligomer
cuucaaaauaacuccuccgga

SEQ ID NO: 4739 - RNA, 21 nt, artificial
  Oligomer
caugagaaucaaggcuauugu

SEQ ID NO: 4740 - RNA, 21 nt, artificial
  Oligomer
gaugugaauagcuguauguag

SEQ ID NO: 4741 - RNA, 21 nt, artificial
  Oligomer
ugugauccaauugcuuucuca

SEQ ID NO: 4742 - RNA, 21 nt, artificial
  Oligomer
auccaauugcuuucucagugu

SEQ ID NO: 4743 - RNA, 21 nt, artificial
  Oligomer
uguugacccaaggauuuuucu

SEQ ID NO: 4744 - RNA, 21 nt, artificial
  Oligomer
ucuuguguaguaguauuuguc

SEQ ID NO: 4745 - RNA, 21 nt, artificial
  Oligomer
cacaaacaggaaaacauucag

SEQ ID NO: 4746 - RNA, 21 nt, artificial
  Oligomer
uucagcccuaaccaaacaacc

SEQ ID NO: 4747 - RNA, 21 nt, artificial
  Oligomer
aauugauaaaaucaccuggga

SEQ ID NO: 4748 - RNA, 21 nt, artificial
  Oligomer
aacgaaguugaaugcaaucaa

SEQ ID NO: 4749 - RNA, 21 nt, artificial
  Oligomer
ugacgagaccaaguaaauuac

SEQ ID NO: 4750 - RNA, 21 nt, artificial
  Oligomer
gagggccacauaagaaaacuc

SEQ ID NO: 4751 - RNA, 21 nt, artificial
  Oligomer
gcuauuguagaaaacucauug

SEQ ID NO: 4752 - RNA, 21 nt, artificial
  Oligomer
augaccaacaauauugcuguc

SEQ ID NO: 4753 - RNA, 21 nt, artificial
  Oligomer
uuugccuaauuccuccaucuc

SEQ ID NO: 4754 - RNA, 21 nt, artificial
  Oligomer
uugccuaauuccuccaucucc

SEQ ID NO: 4755 - RNA, 21 nt, artificial
  Oligomer
uuguuuugagguuguggucug

SEQ ID NO: 4756 - RNA, 21 nt, artificial
  Oligomer
gaccauccacuucaauccugg

SEQ ID NO: 4757 - RNA, 21 nt, artificial
  Oligomer
ggaauuggugaauauuguugu

SEQ ID NO: 4758 - RNA, 21 nt, artificial
  Oligomer
aucugcaauuccaaaacuuug

SEQ ID NO: 4759 - RNA, 21 nt, artificial
  Oligomer
auaacaaccuugguaaucaca

SEQ ID NO: 4760 - RNA, 21 nt, artificial
  Oligomer
acucucauucaugcucuccuc

SEQ ID NO: 4761 - RNA, 21 nt, artificial
  Oligomer
cucucauucaugcucuccucu

SEQ ID NO: 4762 - RNA, 21 nt, artificial
  Oligomer
ucugugagccuuuaagaugug

SEQ ID NO: 4763 - RNA, 21 nt, artificial
  Oligomer
ugaguauaccagaagacuuca

SEQ ID NO: 4764 - RNA, 21 nt, artificial
  Oligomer
ugucacauacuccacugucgu

SEQ ID NO: 4765 - RNA, 21 nt, artificial
  Oligomer
uacuccacugucguguuucgg

SEQ ID NO: 4766 - RNA, 21 nt, artificial
  Oligomer
gauaggcuggagagaauggag

SEQ ID NO: 4767 - RNA, 21 nt, artificial
  Oligomer
uauguaggcagaucauauagg

SEQ ID NO: 4768 - RNA, 21 nt, artificial
  Oligomer
uuguggaaggugagguuguga

SEQ ID NO: 4769 - RNA, 21 nt, artificial
  Oligomer
uaguaguauuugucggccuuc

SEQ ID NO: 4770 - RNA, 21 nt, artificial
  Oligomer
uuugucggccuucucauauuu

SEQ ID NO: 4771 - RNA, 21 nt, artificial
  Oligomer
gucggccuucucauauuucag

SEQ ID NO: 4772 - RNA, 21 nt, artificial
  Oligomer
gaaaacauucagcccuaacca

SEQ ID NO: 4773 - RNA, 21 nt, artificial
  Oligomer
auaacucugaaccaccaaacc

SEQ ID NO: 4774 - RNA, 21 nt, artificial
  Oligomer
aaccacccaguuucccauugu

SEQ ID NO: 4775 - RNA, 21 nt, artificial
  Oligomer
gaagcucaaguaacgaaguug

SEQ ID NO: 4776 - RNA, 21 nt, artificial
  Oligomer
caguuucccauugucaagagg

SEQ ID NO: 4777 - RNA, 21 nt, artificial
  Oligomer
aagagacaaaaugcagauuac

SEQ ID NO: 4778 - RNA, 21 nt, artificial
  Oligomer
uccagggaagucaacagguug

SEQ ID NO: 4779 - RNA, 21 nt, artificial
  Oligomer
uuuuuguuuugagguuguggu

SEQ ID NO: 4780 - RNA, 21 nt, artificial
  Oligomer
gcagaggucaaaguaaaagga

SEQ ID NO: 4781 - RNA, 21 nt, artificial
  Oligomer
cagaggucaaaguaaaaggau

SEQ ID NO: 4782 - RNA, 21 nt, artificial
  Oligomer
cauaacaaccuugguaaucac

SEQ ID NO: 4783 - RNA, 21 nt, artificial
  Oligomer
caaugccgugaaucccuaagc

SEQ ID NO: 4784 - RNA, 21 nt, artificial
  Oligomer
auaaaaagguggugaguauac

SEQ ID NO: 4785 - RNA, 21 nt, artificial
  Oligomer
auaggcuggagagaauggagg

SEQ ID NO: 4786 - RNA, 21 nt, artificial
  Oligomer
ccaauugcuuucucagugugc

SEQ ID NO: 4787 - RNA, 21 nt, artificial
  Oligomer
agauugcgacacacaggaagc

SEQ ID NO: 4788 - RNA, 21 nt, artificial
  Oligomer
auaaguuuauuccgccuuccu

SEQ ID NO: 4789 - RNA, 21 nt, artificial
  Oligomer
aacaggaaaacauucagcccu

SEQ ID NO: 4790 - RNA, 21 nt, artificial
  Oligomer
agaccauaucaaaagugacag

SEQ ID NO: 4791 - RNA, 21 nt, artificial
  Oligomer
ggauuaguuguauaacucuga

SEQ ID NO: 4792 - RNA, 21 nt, artificial
  Oligomer
guuguauaacucugaaccacc

SEQ ID NO: 4793 - RNA, 21 nt, artificial
  Oligomer
aucaaaaaaagaauaccaggg

SEQ ID NO: 4794 - RNA, 21 nt, artificial
  Oligomer
aaaaaagaauaccagggaguc

SEQ ID NO: 4795 - RNA, 21 nt, artificial
  Oligomer
gacgagaccaaguaaauuacu

SEQ ID NO: 4796 - RNA, 21 nt, artificial
  Oligomer
uuacugaagauacaaagagac

SEQ ID NO: 4797 - RNA, 21 nt, artificial
  Oligomer
acaaaaugcagauuaccgucc

SEQ ID NO: 4798 - RNA, 21 nt, artificial
  Oligomer
aaugcagauuaccguccuuau

SEQ ID NO: 4799 - RNA, 21 nt, artificial
  Oligomer
uuaaugcugcaugaccaacaa

SEQ ID NO: 4800 - RNA, 21 nt, artificial
  Oligomer
augcugcaugaccaacaauau

SEQ ID NO: 4801 - RNA, 21 nt, artificial
  Oligomer
aacagggaagauucagcaauc

SEQ ID NO: 4802 - RNA, 21 nt, artificial
  Oligomer
aauuccuccaucuccuguucc

SEQ ID NO: 4803 - RNA, 21 nt, artificial
  Oligomer
cagcacagccacuucauacug

SEQ ID NO: 4804 - RNA, 21 nt, artificial
  Oligomer
augcucuccucuguuugaccc

SEQ ID NO: 4805 - RNA, 21 nt, artificial
  Oligomer
gaaguuaccaugagaaucaag

SEQ ID NO: 4806 - RNA, 21 nt, artificial
  Oligomer
gugauccaauugcuuucucag

SEQ ID NO: 4807 - RNA, 21 nt, artificial
  Oligomer
auaaauugcuguucacacugg

SEQ ID NO: 4808 - RNA, 21 nt, artificial
  Oligomer
uuauuccgccuuccuucucug

SEQ ID NO: 4809 - RNA, 21 nt, artificial
  Oligomer
agaugguaacacuggaauuga

SEQ ID NO: 4810 - RNA, 21 nt, artificial
  Oligomer
cugggauuaguuguauaacuc

SEQ ID NO: 4811 - RNA, 21 nt, artificial
  Oligomer
ucagaaguucuuaaguugcug

SEQ ID NO: 4812 - RNA, 21 nt, artificial
  Oligomer
uaaccacccaguuucccauug

SEQ ID NO: 4813 - RNA, 21 nt, artificial
  Oligomer
aaaccugacgagaccaaguaa

SEQ ID NO: 4814 - RNA, 21 nt, artificial
  Oligomer
aguuucccauugucaagaggu

SEQ ID NO: 4815 - RNA, 21 nt, artificial
  Oligomer
agaccaaguaaauuacugaag

SEQ ID NO: 4816 - RNA, 21 nt, artificial
  Oligomer
agagacaaaaugcagauuacc

SEQ ID NO: 4817 - RNA, 21 nt, artificial
  Oligomer
gacaaaaugcagauuaccguc

SEQ ID NO: 4818 - RNA, 21 nt, artificial
  Oligomer
caaaaugcagauuaccguccu

SEQ ID NO: 4819 - RNA, 21 nt, artificial
  Oligomer
aaaaugcagauuaccguccuu

SEQ ID NO: 4820 - RNA, 21 nt, artificial
  Oligomer
aaaugcagauuaccguccuua

SEQ ID NO: 4821 - RNA, 21 nt, artificial
  Oligomer
cagauuaccguccuuauuccu

SEQ ID NO: 4822 - RNA, 21 nt, artificial
  Oligomer
caugaccaacaauauugcugu

SEQ ID NO: 4823 - RNA, 21 nt, artificial
  Oligomer
cuuugccuaauuccuccaucu

SEQ ID NO: 4824 - RNA, 21 nt, artificial
  Oligomer
guuguugaaccaggaaaaggc

SEQ ID NO: 4825 - RNA, 21 nt, artificial
  Oligomer
cuuuuuuguuuugagguugug

SEQ ID NO: 4826 - RNA, 21 nt, artificial
  Oligomer
uuuggaugggugcauaacaac

SEQ ID NO: 4827 - RNA, 21 nt, artificial
  Oligomer
uauugucaugaucacuccagu

SEQ ID NO: 4828 - RNA, 21 nt, artificial
  Oligomer
auacuccacugucguguuucg

SEQ ID NO: 4829 - RNA, 21 nt, artificial
  Oligomer
uguaguaguauuugucggccu

SEQ ID NO: 4830 - RNA, 21 nt, artificial
  Oligomer
uaguauuugucggccuucuca

SEQ ID NO: 4831 - RNA, 21 nt, artificial
  Oligomer
aaguuuauuccgccuuccuuc

SEQ ID NO: 4832 - RNA, 21 nt, artificial
  Oligomer
auucagcccuaaccaaacaac

SEQ ID NO: 4833 - RNA, 21 nt, artificial
  Oligomer
aauaaauugcuguucacacug

SEQ ID NO: 4834 - RNA, 21 nt, artificial
  Oligomer
uuaaaaagucacccuacuuag

SEQ ID NO: 4835 - RNA, 21 nt, artificial
  Oligomer
acuggaauugauaaaaucacc

SEQ ID NO: 4836 - RNA, 21 nt, artificial
  Oligomer
uuguauaacucugaaccacca

SEQ ID NO: 4837 - RNA, 21 nt, artificial
  Oligomer
uauaacucugaaccaccaaac

SEQ ID NO: 4838 - RNA, 21 nt, artificial
  Oligomer
acucugaaccaccaaaccucu

SEQ ID NO: 4839 - RNA, 21 nt, artificial
  Oligomer
uccaugggcuuuaagaacuuc

SEQ ID NO: 4840 - RNA, 21 nt, artificial
  Oligomer
augggcuuuaagaacuucaga

SEQ ID NO: 4841 - RNA, 21 nt, artificial
  Oligomer
uucagaaguucuuaaguugcu

SEQ ID NO: 4842 - RNA, 21 nt, artificial
  Oligomer
cagaaguucuuaaguugcuga

SEQ ID NO: 4843 - RNA, 21 nt, artificial
  Oligomer
ucaaaaaaagaauaccaggga

SEQ ID NO: 4844 - RNA, 21 nt, artificial
  Oligomer
caaaaaaagaauaccagggag

SEQ ID NO: 4845 - RNA, 21 nt, artificial
  Oligomer
aaaaagaauaccagggaguca

SEQ ID NO: 4846 - RNA, 21 nt, artificial
  Oligomer
aaagaauaccagggagucaag

SEQ ID NO: 4847 - RNA, 21 nt, artificial
  Oligomer
aagaauaccagggagucaagg

SEQ ID NO: 4848 - RNA, 21 nt, artificial
  Oligomer
aaagugacugcucaaaccuga

SEQ ID NO: 4849 - RNA, 21 nt, artificial
  Oligomer
aagugacugcucaaaccugac

SEQ ID NO: 4850 - RNA, 21 nt, artificial
  Oligomer
uuaccguccuuauuccuauaa

SEQ ID NO: 4851 - RNA, 21 nt, artificial
  Oligomer
uaccguccuuauuccuauaac

SEQ ID NO: 4852 - RNA, 21 nt, artificial
  Oligomer
aaagcccuuaugagauuuucu

SEQ ID NO: 4853 - RNA, 21 nt, artificial
  Oligomer
gagagguccuucaggaaugga

SEQ ID NO: 4854 - RNA, 21 nt, artificial
  Oligomer
uaagccaaggauauagaagau

SEQ ID NO: 4855 - RNA, 21 nt, artificial
  Oligomer
uuuucucaucaugagauaggc

SEQ ID NO: 4856 - RNA, 21 nt, artificial
  Oligomer
cagaucauauaggccaccagc

SEQ ID NO: 4857 - RNA, 21 nt, artificial
  Oligomer
uccaauugcuuucucagugug

SEQ ID NO: 4858 - RNA, 21 nt, artificial
  Oligomer
aaauucaagcagagagcagac

SEQ ID NO: 4859 - RNA, 21 nt, artificial
  Oligomer
uuuauuccgccuuccuucucu

SEQ ID NO: 4860 - RNA, 21 nt, artificial
  Oligomer
uaaauugcuguucacacugga

SEQ ID NO: 4861 - RNA, 21 nt, artificial
  Oligomer
gauuacaaaccaaaacucagg

SEQ ID NO: 4862 - RNA, 21 nt, artificial
  Oligomer
aaaacucaggagaugguaaca

SEQ ID NO: 4863 - RNA, 21 nt, artificial
  Oligomer
aaacucaggagaugguaacac

SEQ ID NO: 4864 - RNA, 21 nt, artificial
  Oligomer
aacucaggagaugguaacacu

SEQ ID NO: 4865 - RNA, 21 nt, artificial
  Oligomer
acucaggagaugguaacacug

SEQ ID NO: 4866 - RNA, 21 nt, artificial
  Oligomer
auugauaaaaucaccugggau

SEQ ID NO: 4867 - RNA, 21 nt, artificial
  Oligomer
uaacucugaaccaccaaaccu

SEQ ID NO: 4868 - RNA, 21 nt, artificial
  Oligomer
ucugaaccaccaaaccucugc

SEQ ID NO: 4869 - RNA, 21 nt, artificial
  Oligomer
aaaaaaagaauaccagggagu

SEQ ID NO: 4870 - RNA, 21 nt, artificial
  Oligomer
agaauaccagggagucaaggc

SEQ ID NO: 4871 - RNA, 21 nt, artificial
  Oligomer
ugacugcucaaaccugacgag

SEQ ID NO: 4872 - RNA, 21 nt, artificial
  Oligomer
gagacaaaaugcagauuaccg

SEQ ID NO: 4873 - RNA, 21 nt, artificial
  Oligomer
guuuagaaaacccacuuugcc

SEQ ID NO: 4874 - RNA, 21 nt, artificial
  Oligomer
aauauuguuguucgaaagccc

SEQ ID NO: 4875 - RNA, 21 nt, artificial
  Oligomer
ucaggaauggaacauuugucc

SEQ ID NO: 4876 - RNA, 21 nt, artificial
  Oligomer
agaagauaaaaagguggugag

SEQ ID NO: 4877 - RNA, 21 nt, artificial
  Oligomer
cuccggaugaacucaguagcu

SEQ ID NO: 4878 - RNA, 21 nt, artificial
  Oligomer
uuaaaauucaagcagagagca

SEQ ID NO: 4879 - RNA, 21 nt, artificial
  Oligomer
uaaaauucaagcagagagcag

SEQ ID NO: 4880 - RNA, 21 nt, artificial
  Oligomer
aaagugacaguaaacauguac

SEQ ID NO: 4881 - RNA, 21 nt, artificial
  Oligomer
gucacccuacuuaggaaaucu

SEQ ID NO: 4882 - RNA, 21 nt, artificial
  Oligomer
cugaaccaccaaaccucugcu

SEQ ID NO: 4883 - RNA, 21 nt, artificial
  Oligomer
uaucaagccuugcuacaguca

SEQ ID NO: 4884 - RNA, 21 nt, artificial
  Oligomer
ucugagaaaggauccaugggc

SEQ ID NO: 4885 - RNA, 21 nt, artificial
  Oligomer
auccaugggcuuuaagaacuu

SEQ ID NO: 4886 - RNA, 21 nt, artificial
  Oligomer
uacugaagauacaaagagaca

SEQ ID NO: 4887 - RNA, 21 nt, artificial
  Oligomer
uacaaagagacaaaaugcaga

SEQ ID NO: 4888 - RNA, 21 nt, artificial
  Oligomer
uuguagaaaacucauuguccc

SEQ ID NO: 4889 - RNA, 21 nt, artificial
  Oligomer
accaacaauauugcuguccca

SEQ ID NO: 4890 - RNA, 21 nt, artificial
  Oligomer
uagaaaacccacuuugccuaa

SEQ ID NO: 4891 - RNA, 21 nt, artificial
  Oligomer
uaauuccuccaucuccuguuc

SEQ ID NO: 4892 - RNA, 21 nt, artificial
  Oligomer
agucacgaucaucccacaucu

SEQ ID NO: 4893 - RNA, 21 nt, artificial
  Oligomer
gucacgaucaucccacaucuc

SEQ ID NO: 4894 - RNA, 21 nt, artificial
  Oligomer
aaauaacuccuccggaugaac

SEQ ID NO: 4895 - RNA, 21 nt, artificial
  Oligomer
aaggacagcagauugcgacac

SEQ ID NO: 4896 - RNA, 21 nt, artificial
  Oligomer
aacucugaaccaccaaaccuc

SEQ ID NO: 4897 - RNA, 21 nt, artificial
  Oligomer
cugagaaaggauccaugggcu

SEQ ID NO: 4898 - RNA, 21 nt, artificial
  Oligomer
caugggcuuuaagaacuucag

SEQ ID NO: 4899 - RNA, 21 nt, artificial
  Oligomer
aaguucuuaaguugcugaagc

SEQ ID NO: 4900 - RNA, 21 nt, artificial
  Oligomer
gugacugcucaaaccugacga

SEQ ID NO: 4901 - RNA, 21 nt, artificial
  Oligomer
uuuagaaaacccacuuugccu

SEQ ID NO: 4902 - RNA, 21 nt, artificial
  Oligomer
uuguaccagauggauuucaag

SEQ ID NO: 4903 - RNA, 21 nt, artificial
  Oligomer
ugcugaagccacgcuuguuca

SEQ ID NO: 4904 - RNA, 21 nt, artificial
  Oligomer
guaaucacaaccuucugcugg

SEQ ID NO: 4905 - RNA, 21 nt, artificial
  Oligomer
aauggaacauuuguccagcgc

SEQ ID NO: 4906 - RNA, 21 nt, artificial
  Oligomer
uuucucaucaugagauaggcu

SEQ ID NO: 4907 - RNA, 21 nt, artificial
  Oligomer
acacacaggaagcaggaucag

SEQ ID NO: 4908 - RNA, 21 nt, artificial
  Oligomer
accucugcuaucaagccuugc

SEQ ID NO: 4909 - RNA, 21 nt, artificial
  Oligomer
uauuuuucugagaaaggaucc

SEQ ID NO: 4910 - RNA, 21 nt, artificial
  Oligomer
auugucccacauuggucuccc

SEQ ID NO: 4911 - RNA, 21 nt, artificial
  Oligomer
uuucagaccugucacgauguc

SEQ ID NO: 4912 - RNA, 21 nt, artificial
  Oligomer
caauuccaaaacuuuggaugg

SEQ ID NO: 4913 - RNA, 21 nt, artificial
  Oligomer
cucaggaaggacagcagauug

SEQ ID NO: 4914 - RNA, 21 nt, artificial
  Oligomer
ucaggaaggacagcagauugc

SEQ ID NO: 4915 - RNA, 21 nt, artificial
  Oligomer
aaugaauaaguuuauuccgcc

SEQ ID NO: 4916 - RNA, 21 nt, artificial
  Oligomer
uacuuaggaaaucuucugugg

SEQ ID NO: 4917 - RNA, 21 nt, artificial
  Oligomer
gaacuucagaacuuuaagaac

SEQ ID NO: 4918 - RNA, 21 nt, artificial
  Oligomer
uaggauccagacuggaauauc

SEQ ID NO: 4919 - RNA, 21 nt, artificial
  Oligomer
uaucggugacagcauuugcgc

SEQ ID NO: 4920 - RNA, 21 nt, artificial
  Oligomer
cuugucaaaguuuaaugcugc

SEQ ID NO: 4921 - RNA, 21 nt, artificial
  Oligomer
gaaagcccuuaugagauuuuc

SEQ ID NO: 4922 - RNA, 21 nt, artificial
  Oligomer
gaauggaacauuuguccagcg

SEQ ID NO: 4923 - RNA, 21 nt, artificial
  Oligomer
auaacuccuccggaugaacuc

SEQ ID NO: 4924 - RNA, 21 nt, artificial
  Oligomer
cuuuuucucaucaugagauag

SEQ ID NO: 4925 - RNA, 21 nt, artificial
  Oligomer
uuuuucucaucaugagauagg

SEQ ID NO: 4926 - RNA, 21 nt, artificial
  Oligomer
uagcagucaaaguuaaacagg

SEQ ID NO: 4927 - RNA, 21 nt, artificial
  Oligomer
aucagcgugcuguuaaaauuc

SEQ ID NO: 4928 - RNA, 21 nt, artificial
  Oligomer
aacaaaacugaaaaccagugg

SEQ ID NO: 4929 - RNA, 21 nt, artificial
  Oligomer
uguagaaaacucauuguccca

SEQ ID NO: 4930 - RNA, 21 nt, artificial
  Oligomer
uagaaaacucauugucccaca

SEQ ID NO: 4931 - RNA, 21 nt, artificial
  Oligomer
uuguuguucgaaagcccuuau

SEQ ID NO: 4932 - RNA, 21 nt, artificial
  Oligomer
guuguucgaaagcccuuauga

SEQ ID NO: 4933 - RNA, 21 nt, artificial
  Oligomer
aagcccuuaugagauuuucug

SEQ ID NO: 4934 - RNA, 21 nt, artificial
  Oligomer
aauggagaagaaaucuuccuc

SEQ ID NO: 4935 - RNA, 21 nt, artificial
  Oligomer
aaugaccggugcaaggaucca

SEQ ID NO: 4936 - RNA, 21 nt, artificial
  Oligomer
cuacagugggagucacgauca

SEQ ID NO: 4937 - RNA, 21 nt, artificial
  Oligomer
auauuucaggaaggcauccac

SEQ ID NO: 4938 - RNA, 21 nt, artificial
  Oligomer
guagcuauuguagaaaacuca

SEQ ID NO: 4939 - RNA, 21 nt, artificial
  Oligomer
acaauauugcugucccauccg

SEQ ID NO: 4940 - RNA, 21 nt, artificial
  Oligomer
uuccuccaucuccuguuccag

SEQ ID NO: 4941 - RNA, 21 nt, artificial
  Oligomer
auacuggaaaacauccucacu

SEQ ID NO: 4942 - RNA, 21 nt, artificial
  Oligomer
uuguucgaaagcccuuaugag

SEQ ID NO: 4943 - RNA, 21 nt, artificial
  Oligomer
ugaauggagaagaaaucuucc

SEQ ID NO: 4944 - RNA, 21 nt, artificial
  Oligomer
aauuccaaaacuuuggauggg

SEQ ID NO: 4945 - RNA, 21 nt, artificial
  Oligomer
augggugcauaacaaccuugg

SEQ ID NO: 4946 - RNA, 21 nt, artificial
  Oligomer
augcccuucaaacuuagggcg

SEQ ID NO: 4947 - RNA, 21 nt, artificial
  Oligomer
aagaugugaaaaacacacacc

SEQ ID NO: 4948 - RNA, 21 nt, artificial
  Oligomer
auagcagucaaaguuaaacag

SEQ ID NO: 4949 - RNA, 21 nt, artificial
  Oligomer
uaaaaagucacccuacuuagg

SEQ ID NO: 4950 - RNA, 21 nt, artificial
  Oligomer
aaaccaaaacucaggagaugg

SEQ ID NO: 4951 - RNA, 21 nt, artificial
  Oligomer
cuaucaagccuugcuacaguc

SEQ ID NO: 4952 - RNA, 21 nt, artificial
  Oligomer
ucaaguaacgaaguugaaugc

SEQ ID NO: 4953 - RNA, 21 nt, artificial
  Oligomer
cuaaagugacugcucaaaccu

SEQ ID NO: 4954 - RNA, 21 nt, artificial
  Oligomer
uugucaaaguuuaaugcugca

SEQ ID NO: 4955 - RNA, 21 nt, artificial
  Oligomer
auuggugaauauuguuguucg

SEQ ID NO: 4956 - RNA, 21 nt, artificial
  Oligomer
uaugagauuuucuguccaguc

SEQ ID NO: 4957 - RNA, 21 nt, artificial
  Oligomer
uugguaaucacaaccuucugc

SEQ ID NO: 4958 - RNA, 21 nt, artificial
  Oligomer
aucaucccacaucucaaaaga

SEQ ID NO: 4959 - RNA, 21 nt, artificial
  Oligomer
ucaucccacaucucaaaagac

SEQ ID NO: 4960 - RNA, 21 nt, artificial
  Oligomer
uaagaugugaaaaacacacac

SEQ ID NO: 4961 - RNA, 21 nt, artificial
  Oligomer
gugagguugugauccaauugc

SEQ ID NO: 4962 - RNA, 21 nt, artificial
  Oligomer
uauuucaggaaggcauccaca

SEQ ID NO: 4963 - RNA, 21 nt, artificial
  Oligomer
aaaaagucacccuacuuagga

SEQ ID NO: 4964 - RNA, 21 nt, artificial
  Oligomer
uaaagugacugcucaaaccug

SEQ ID NO: 4965 - RNA, 21 nt, artificial
  Oligomer
aacaauauugcugucccaucc

SEQ ID NO: 4966 - RNA, 21 nt, artificial
  Oligomer
aaacauccucacuggcugugc

SEQ ID NO: 4967 - RNA, 21 nt, artificial
  Oligomer
auauuguuguucgaaagcccu

SEQ ID NO: 4968 - RNA, 21 nt, artificial
  Oligomer
augaauggagaagaaaucuuc

SEQ ID NO: 4969 - RNA, 21 nt, artificial
  Oligomer
auggagaagaaaucuuccucu

SEQ ID NO: 4970 - RNA, 21 nt, artificial
  Oligomer
cuggugaaugucacauacucc

SEQ ID NO: 4971 - RNA, 21 nt, artificial
  Oligomer
augaauaaguuuauuccgccu

SEQ ID NO: 4972 - RNA, 21 nt, artificial
  Oligomer
uaaccaaacaaccagaaacaa

SEQ ID NO: 4973 - RNA, 21 nt, artificial
  Oligomer
cuacuuaggaaaucuucugug

SEQ ID NO: 4974 - RNA, 21 nt, artificial
  Oligomer
acuuaggaaaucuucuguggg

SEQ ID NO: 4975 - RNA, 21 nt, artificial
  Oligomer
uuacaaaccaaaacucaggag

SEQ ID NO: 4976 - RNA, 21 nt, artificial
  Oligomer
aaaaccagugguuaaccaccc

SEQ ID NO: 4977 - RNA, 21 nt, artificial
  Oligomer
aaaccagugguuaaccaccca

SEQ ID NO: 4978 - RNA, 21 nt, artificial
  Oligomer
cagaacuuuaagaacuucaga

SEQ ID NO: 4979 - RNA, 21 nt, artificial
  Oligomer
uugagaggcacauucuuaucc

SEQ ID NO: 4980 - RNA, 21 nt, artificial
  Oligomer
cacauucuuauccuaaaguga

SEQ ID NO: 4981 - RNA, 21 nt, artificial
  Oligomer
aacucccacuacagacuuggg

SEQ ID NO: 4982 - RNA, 21 nt, artificial
  Oligomer
acgguaguuuagaaaacccac

SEQ ID NO: 4983 - RNA, 21 nt, artificial
  Oligomer
uuaugagauuuucuguccagu

SEQ ID NO: 4984 - RNA, 21 nt, artificial
  Oligomer
auuccaaaacuuuggaugggu

SEQ ID NO: 4985 - RNA, 21 nt, artificial
  Oligomer
ggaauggaacauuuguccagc

SEQ ID NO: 4986 - RNA, 21 nt, artificial
  Oligomer
caaaagacucugcacacuugc

SEQ ID NO: 4987 - RNA, 21 nt, artificial
  Oligomer
uuccaccaaugccgugaaucc

SEQ ID NO: 4988 - RNA, 21 nt, artificial
  Oligomer
ucucaucaugagauaggcugg

SEQ ID NO: 4989 - RNA, 21 nt, artificial
  Oligomer
aaaacugaaaaccagugguua

SEQ ID NO: 4990 - RNA, 21 nt, artificial
  Oligomer
aaaaucaccugggauuaguug

SEQ ID NO: 4991 - RNA, 21 nt, artificial
  Oligomer
aaccagugguuaaccacccag

SEQ ID NO: 4992 - RNA, 21 nt, artificial
  Oligomer
uuucugagaaaggauccaugg

SEQ ID NO: 4993 - RNA, 21 nt, artificial
  Oligomer
cuucagaacuuuaagaacuuc

SEQ ID NO: 4994 - RNA, 21 nt, artificial
  Oligomer
ucagaacuuuaagaacuucag

SEQ ID NO: 4995 - RNA, 21 nt, artificial
  Oligomer
uuguugaaguagaauugaacc

SEQ ID NO: 4996 - RNA, 21 nt, artificial
  Oligomer
aaacucauugucccacauugg

SEQ ID NO: 4997 - RNA, 21 nt, artificial
  Oligomer
aaaguuuaaugcugcaugacc

SEQ ID NO: 4998 - RNA, 21 nt, artificial
  Oligomer
caauauugcugucccauccgg

SEQ ID NO: 4999 - RNA, 21 nt, artificial
  Oligomer
auggauuucaagauagaagca

SEQ ID NO: 5000 - RNA, 21 nt, artificial
  Oligomer
uuccaggagagagauugaggg

SEQ ID NO: 5001 - RNA, 21 nt, artificial
  Oligomer
aagccacgcuuguucaucugc

SEQ ID NO: 5002 - RNA, 21 nt, artificial
  Oligomer
cgcuuguucaucugcaauucc

SEQ ID NO: 5003 - RNA, 21 nt, artificial
  Oligomer
uucaggaauggaacauuuguc

SEQ ID NO: 5004 - RNA, 21 nt, artificial
  Oligomer
caggaauggaacauuugucca

SEQ ID NO: 5005 - RNA, 21 nt, artificial
  Oligomer
gaugcccuucaaacuuagggc

SEQ ID NO: 5006 - RNA, 21 nt, artificial
  Oligomer
acgcuggugaaugucacauac

SEQ ID NO: 5007 - RNA, 21 nt, artificial
  Oligomer
ugcaaugaugugaauagcugu

SEQ ID NO: 5008 - RNA, 21 nt, artificial
  Oligomer
ugugaauagcuguauguaggc

SEQ ID NO: 5009 - RNA, 21 nt, artificial
  Oligomer
ugaauagcuguauguaggcag

SEQ ID NO: 5010 - RNA, 21 nt, artificial
  Oligomer
aauugcuuucucagugugcgg

SEQ ID NO: 5011 - RNA, 21 nt, artificial
  Oligomer
agugugcggcugcaaaaugag

SEQ ID NO: 5012 - RNA, 21 nt, artificial
  Oligomer
aacaaccagaaacaaaacuga

SEQ ID NO: 5013 - RNA, 21 nt, artificial
  Oligomer
acacuguugguguuauauggg

SEQ ID NO: 5014 - RNA, 21 nt, artificial
  Oligomer
cacccuacuuaggaaaucuuc

SEQ ID NO: 5015 - RNA, 21 nt, artificial
  Oligomer
caagccuugcuacagucaugg

SEQ ID NO: 5016 - RNA, 21 nt, artificial
  Oligomer
aagcucaaguaacgaaguuga

SEQ ID NO: 5017 - RNA, 21 nt, artificial
  Oligomer
aaggcuugagaggcacauucu

SEQ ID NO: 5018 - RNA, 21 nt, artificial
  Oligomer
uuucccauugucaagaggugg

SEQ ID NO: 5019 - RNA, 21 nt, artificial
  Oligomer
auugaaccuuucuaggaucca

SEQ ID NO: 5020 - RNA, 21 nt, artificial
  Oligomer
caaaguuuaaugcugcaugac

SEQ ID NO: 5021 - RNA, 21 nt, artificial
  Oligomer
gacgguaguuuagaaaaccca

SEQ ID NO: 5022 - RNA, 21 nt, artificial
  Oligomer
uguuccagggaagucaacagg

SEQ ID NO: 5023 - RNA, 21 nt, artificial
  Oligomer
aagucaacagguuguugaacc

SEQ ID NO: 5024 - RNA, 21 nt, artificial
  Oligomer
aagauucagcaauccggauuc

SEQ ID NO: 5025 - RNA, 21 nt, artificial
  Oligomer
auuucaagauagaagcaaagg

SEQ ID NO: 5026 - RNA, 21 nt, artificial
  Oligomer
auucuggagagguccuucagg

SEQ ID NO: 5027 - RNA, 21 nt, artificial
  Oligomer
augcugaagccacgcuuguuc

SEQ ID NO: 5028 - RNA, 21 nt, artificial
  Oligomer
acgcuuguucaucugcaauuc

SEQ ID NO: 5029 - RNA, 21 nt, artificial
  Oligomer
accuugguaaucacaaccuuc

SEQ ID NO: 5030 - RNA, 21 nt, artificial
  Oligomer
aaaagacucugcacacuugcg

SEQ ID NO: 5031 - RNA, 21 nt, artificial
  Oligomer
uaccaugagaaucaaggcuau

SEQ ID NO: 5032 - RNA, 21 nt, artificial
  Oligomer
aucaugagauaggcuggagag

SEQ ID NO: 5033 - RNA, 21 nt, artificial
  Oligomer
aacaggugugcaaugauguga

SEQ ID NO: 5034 - RNA, 21 nt, artificial
  Oligomer
ugugcaaugaugugaauagcu

SEQ ID NO: 5035 - RNA, 21 nt, artificial
  Oligomer
uaggcagaucauauaggccac

SEQ ID NO: 5036 - RNA, 21 nt, artificial
  Oligomer
ucauauuucaggaaggcaucc

SEQ ID NO: 5037 - RNA, 21 nt, artificial
  Oligomer
agugacaguaaacauguacac

SEQ ID NO: 5038 - RNA, 21 nt, artificial
  Oligomer
uacacuguugguguuauaugg

SEQ ID NO: 5039 - RNA, 21 nt, artificial
  Oligomer
aaccucugcuaucaagccuug

SEQ ID NO: 5040 - RNA, 21 nt, artificial
  Oligomer
aagccuugcuacagucauggc

SEQ ID NO: 5041 - RNA, 21 nt, artificial
  Oligomer
uuuuucugagaaaggauccau

SEQ ID NO: 5042 - RNA, 21 nt, artificial
  Oligomer
uuuucugagaaaggauccaug

SEQ ID NO: 5043 - RNA, 21 nt, artificial
  Oligomer
cuugagaggcacauucuuauc

SEQ ID NO: 5044 - RNA, 21 nt, artificial
  Oligomer
ugagaggcacauucuuauccu

SEQ ID NO: 5045 - RNA, 21 nt, artificial
  Oligomer
aauugaaccuuucuaggaucc

SEQ ID NO: 5046 - RNA, 21 nt, artificial
  Oligomer
ucauugucccacauuggucuc

SEQ ID NO: 5047 - RNA, 21 nt, artificial
  Oligomer
uuucuguuucagaccugucac

SEQ ID NO: 5048 - RNA, 21 nt, artificial
  Oligomer
agacgguaguuuagaaaaccc

SEQ ID NO: 5049 - RNA, 21 nt, artificial
  Oligomer
agucaacagguuguugaacca

SEQ ID NO: 5050 - RNA, 21 nt, artificial
  Oligomer
ugcacacuggaauuuguacca

SEQ ID NO: 5051 - RNA, 21 nt, artificial
  Oligomer
acuggaauuuguaccagaugg

SEQ ID NO: 5052 - RNA, 21 nt, artificial
  Oligomer
auucagcaauccggauucugg

SEQ ID NO: 5053 - RNA, 21 nt, artificial
  Oligomer
caauccggauucuggagaggu

SEQ ID NO: 5054 - RNA, 21 nt, artificial
  Oligomer
uuggugaauauuguuguucga

SEQ ID NO: 5055 - RNA, 21 nt, artificial
  Oligomer
ugaauauuguuguucgaaagc

SEQ ID NO: 5056 - RNA, 21 nt, artificial
  Oligomer
ugcugcucggauaugaaugga

SEQ ID NO: 5057 - RNA, 21 nt, artificial
  Oligomer
ggagaagaaaucuuccucugg

SEQ ID NO: 5058 - RNA, 21 nt, artificial
  Oligomer
aguaaaaggaugccauuccag

SEQ ID NO: 5059 - RNA, 21 nt, artificial
  Oligomer
aaggaugccauuccaggagag

SEQ ID NO: 5060 - RNA, 21 nt, artificial
  Oligomer
aaacuuuggaugggugcauaa

SEQ ID NO: 5061 - RNA, 21 nt, artificial
  Oligomer
aaccuugguaaucacaaccuu

SEQ ID NO: 5062 - RNA, 21 nt, artificial
  Oligomer
cuugguaaucacaaccuucug

SEQ ID NO: 5063 - RNA, 21 nt, artificial
  Oligomer
uucugcugggagcgguaaaac

SEQ ID NO: 5064 - RNA, 21 nt, artificial
  Oligomer
auggaacauuuguccagcgca

SEQ ID NO: 5065 - RNA, 21 nt, artificial
  Oligomer
gaggaugacucucauucaugc

SEQ ID NO: 5066 - RNA, 21 nt, artificial
  Oligomer
aaagguggugaguauaccaga

SEQ ID NO: 5067 - RNA, 21 nt, artificial
  Oligomer
caguagcugaaguuaccauga

SEQ ID NO: 5068 - RNA, 21 nt, artificial
  Oligomer
aguuaccaugagaaucaaggc

SEQ ID NO: 5069 - RNA, 21 nt, artificial
  Oligomer
uuaccaugagaaucaaggcua

SEQ ID NO: 5070 - RNA, 21 nt, artificial
  Oligomer
augagaaucaaggcuauuguc

SEQ ID NO: 5071 - RNA, 21 nt, artificial
  Oligomer
cauacuccacugucguguuuc

SEQ ID NO: 5072 - RNA, 21 nt, artificial
  Oligomer
agaugugaaaaacacacaccu

SEQ ID NO: 5073 - RNA, 21 nt, artificial
  Oligomer
uagcuguauguaggcagauca

SEQ ID NO: 5074 - RNA, 21 nt, artificial
  Oligomer
auauaggccaccagcuugugg

SEQ ID NO: 5075 - RNA, 21 nt, artificial
  Oligomer
ggaaugaauaaguuuauuccg

SEQ ID NO: 5076 - RNA, 21 nt, artificial
  Oligomer
acaaaacugaaaaccaguggu

SEQ ID NO: 5077 - RNA, 21 nt, artificial
  Oligomer
aagugacaguaaacauguaca

SEQ ID NO: 5078 - RNA, 21 nt, artificial
  Oligomer
uacaaaccaaaacucaggaga

SEQ ID NO: 5079 - RNA, 21 nt, artificial
  Oligomer
auggcuguccagaaagauuua

SEQ ID NO: 5080 - RNA, 21 nt, artificial
  Oligomer
auuuuucugagaaaggaucca

SEQ ID NO: 5081 - RNA, 21 nt, artificial
  Oligomer
aggauccagacuggaauaucg

SEQ ID NO: 5082 - RNA, 21 nt, artificial
  Oligomer
ggauccagacuggaauaucgg

SEQ ID NO: 5083 - RNA, 21 nt, artificial
  Oligomer
auaucggugacagcauuugcg

SEQ ID NO: 5084 - RNA, 21 nt, artificial
  Oligomer
aucggugacagcauuugcgca

SEQ ID NO: 5085 - RNA, 21 nt, artificial
  Oligomer
ucaaaguuuaaugcugcauga

SEQ ID NO: 5086 - RNA, 21 nt, artificial
  Oligomer
aaccaggaaaaggcaccuguc

SEQ ID NO: 5087 - RNA, 21 nt, artificial
  Oligomer
gcacacuggaauuuguaccag

SEQ ID NO: 5088 - RNA, 21 nt, artificial
  Oligomer
agauucagcaauccggauucu

SEQ ID NO: 5089 - RNA, 21 nt, artificial
  Oligomer
agcaauccggauucuggagag

SEQ ID NO: 5090 - RNA, 21 nt, artificial
  Oligomer
gaauauuguuguucgaaagcc

SEQ ID NO: 5091 - RNA, 21 nt, artificial
  Oligomer
gauucuggagagguccuucag

SEQ ID NO: 5092 - RNA, 21 nt, artificial
  Oligomer
augagauuuucuguccagucc

SEQ ID NO: 5093 - RNA, 21 nt, artificial
  Oligomer
aaaguaaaaggaugccauucc

SEQ ID NO: 5094 - RNA, 21 nt, artificial
  Oligomer
uaaaaggaugccauuccagga

SEQ ID NO: 5095 - RNA, 21 nt, artificial
  Oligomer
gaugggugcauaacaaccuug

SEQ ID NO: 5096 - RNA, 21 nt, artificial
  Oligomer
aaccggaggauccuuucacag

SEQ ID NO: 5097 - RNA, 21 nt, artificial
  Oligomer
aagacucugcacacuugcgag

SEQ ID NO: 5098 - RNA, 21 nt, artificial
  Oligomer
uucucuggacagaacugugcu

SEQ ID NO: 5099 - RNA, 21 nt, artificial
  Oligomer
aaaaagguggugaguauacca

SEQ ID NO: 5100 - RNA, 21 nt, artificial
  Oligomer
aaaagguggugaguauaccag

SEQ ID NO: 5101 - RNA, 21 nt, artificial
  Oligomer
uaacuccuccggaugaacuca

SEQ ID NO: 5102 - RNA, 21 nt, artificial
  Oligomer
aaggcuauugucaugaucacu

SEQ ID NO: 5103 - RNA, 21 nt, artificial
  Oligomer
ugaucacuccagugagaccag

SEQ ID NO: 5104 - RNA, 21 nt, artificial
  Oligomer
aauagcuguauguaggcagau

SEQ ID NO: 5105 - RNA, 21 nt, artificial
  Oligomer
uguaggcagaucauauaggcc

SEQ ID NO: 5106 - RNA, 21 nt, artificial
  Oligomer
ugagguugugauccaauugcu

SEQ ID NO: 5107 - RNA, 21 nt, artificial
  Oligomer
uuccugggaaugaauaaguuu

SEQ ID NO: 5108 - RNA, 21 nt, artificial
  Oligomer
uucaagcagagagcagacgcu

SEQ ID NO: 5109 - RNA, 21 nt, artificial
  Oligomer
gacccaaggauuuuucuugug

SEQ ID NO: 5110 - RNA, 21 nt, artificial
  Oligomer
cuucucauauuucaggaaggc

SEQ ID NO: 5111 - RNA, 21 nt, artificial
  Oligomer
acaaccagaaacaaaacugaa

SEQ ID NO: 5112 - RNA, 21 nt, artificial
  Oligomer
uaaaaucaccugggauuaguu

SEQ ID NO: 5113 - RNA, 21 nt, artificial
  Oligomer
ucugcuaucaagccuugcuac

SEQ ID NO: 5114 - RNA, 21 nt, artificial
  Oligomer
cuucagaaguucuuaaguugc

SEQ ID NO: 5115 - RNA, 21 nt, artificial
  Oligomer
uugcugaagcucaaguaacga

SEQ ID NO: 5116 - RNA, 21 nt, artificial
  Oligomer
uaccagggagucaaggcuuga

SEQ ID NO: 5117 - RNA, 21 nt, artificial
  Oligomer
gaaguagaauugaaccuuucu

SEQ ID NO: 5118 - RNA, 21 nt, artificial
  Oligomer
uugaaccuuucuaggauccag

SEQ ID NO: 5119 - RNA, 21 nt, artificial
  Oligomer
agacuggaauaucggugacag

SEQ ID NO: 5120 - RNA, 21 nt, artificial
  Oligomer
auuugcgcaggcucuuugcca

SEQ ID NO: 5121 - RNA, 21 nt, artificial
  Oligomer
ugucaagaggugguuuggagc

SEQ ID NO: 5122 - RNA, 21 nt, artificial
  Oligomer
cauugucccacauuggucucc

SEQ ID NO: 5123 - RNA, 21 nt, artificial
  Oligomer
uaggcaacagggaagauucag

SEQ ID NO: 5124 - RNA, 21 nt, artificial
  Oligomer
agggaagauucagcaauccgg

SEQ ID NO: 5125 - RNA, 21 nt, artificial
  Oligomer
caacagguuguugaaccagga

SEQ ID NO: 5126 - RNA, 21 nt, artificial
  Oligomer
aacagguuguugaaccaggaa

SEQ ID NO: 5127 - RNA, 21 nt, artificial
  Oligomer
auccugggaauuggugaauau

SEQ ID NO: 5128 - RNA, 21 nt, artificial
  Oligomer
cuuaugagauuuucuguccag

SEQ ID NO: 5129 - RNA, 21 nt, artificial
  Oligomer
ugagauuuucuguccaguccc

SEQ ID NO: 5130 - RNA, 21 nt, artificial
  Oligomer
cugcugcucggauaugaaugg

SEQ ID NO: 5131 - RNA, 21 nt, artificial
  Oligomer
uggagaagaaaucuuccucug

SEQ ID NO: 5132 - RNA, 21 nt, artificial
  Oligomer
aaucuuccucuggagcagagg

SEQ ID NO: 5133 - RNA, 21 nt, artificial
  Oligomer
aaguaaaaggaugccauucca

SEQ ID NO: 5134 - RNA, 21 nt, artificial
  Oligomer
aaaaggaugccauuccaggag

SEQ ID NO: 5135 - RNA, 21 nt, artificial
  Oligomer
aaaggaugccauuccaggaga

SEQ ID NO: 5136 - RNA, 21 nt, artificial
  Oligomer
auccacuuccaagacucaggg

SEQ ID NO: 5137 - RNA, 21 nt, artificial
  Oligomer
cuucaaacuuagggcgccuac

SEQ ID NO: 5138 - RNA, 21 nt, artificial
  Oligomer
ucaugaucacuccagugagac

SEQ ID NO: 5139 - RNA, 21 nt, artificial
  Oligomer
augaucacuccagugagacca

SEQ ID NO: 5140 - RNA, 21 nt, artificial
  Oligomer
auaggccaccagcuuguggaa

SEQ ID NO: 5141 - RNA, 21 nt, artificial
  Oligomer
gggaaugaauaaguuuauucc

SEQ ID NO: 5142 - RNA, 21 nt, artificial
  Oligomer
gaaugaauaaguuuauuccgc

SEQ ID NO: 5143 - RNA, 21 nt, artificial
  Oligomer
gauaagaccauaucaaaagug

SEQ ID NO: 5144 - RNA, 21 nt, artificial
  Oligomer
acugaaaaccagugguuaacc

SEQ ID NO: 5145 - RNA, 21 nt, artificial
  Oligomer
auuacaaaccaaaacucagga

SEQ ID NO: 5146 - RNA, 21 nt, artificial
  Oligomer
ugggauuaguuguauaacucu

SEQ ID NO: 5147 - RNA, 21 nt, artificial
  Oligomer
gugguuaaccacccaguuucc

SEQ ID NO: 5148 - RNA, 21 nt, artificial
  Oligomer
cuguccagaaagauuuacagu

SEQ ID NO: 5149 - RNA, 21 nt, artificial
  Oligomer
aguagaauugaaccuuucuag

SEQ ID NO: 5150 - RNA, 21 nt, artificial
  Oligomer
guagaauugaaccuuucuagg

SEQ ID NO: 5151 - RNA, 21 nt, artificial
  Oligomer
cauugucaagaggugguuugg

SEQ ID NO: 5152 - RNA, 21 nt, artificial
  Oligomer
gggccacauaagaaaacuccc

SEQ ID NO: 5153 - RNA, 21 nt, artificial
  Oligomer
uuuggagcccuucuaggcaac

SEQ ID NO: 5154 - RNA, 21 nt, artificial
  Oligomer
aaaggagguuuucuguuucag

SEQ ID NO: 5155 - RNA, 21 nt, artificial
  Oligomer
gccuugucaaaguuuaaugcu

SEQ ID NO: 5156 - RNA, 21 nt, artificial
  Oligomer
gagacgguaguuuagaaaacc

SEQ ID NO: 5157 - RNA, 21 nt, artificial
  Oligomer
cugcagauccaguagaaauag

SEQ ID NO: 5158 - RNA, 21 nt, artificial
  Oligomer
gauggauuucaagauagaagc

SEQ ID NO: 5159 - RNA, 21 nt, artificial
  Oligomer
acuggaaaacauccucacugg

SEQ ID NO: 5160 - RNA, 21 nt, artificial
  Oligomer
accauccacuucaauccuggg

SEQ ID NO: 5161 - RNA, 21 nt, artificial
  Oligomer
uccaaaacuuuggaugggugc

SEQ ID NO: 5162 - RNA, 21 nt, artificial
  Oligomer
aaaccggaggauccuuucaca

SEQ ID NO: 5163 - RNA, 21 nt, artificial
  Oligomer
aaagacucugcacacuugcga

SEQ ID NO: 5164 - RNA, 21 nt, artificial
  Oligomer
cacacuugcgaggaugacucu

SEQ ID NO: 5165 - RNA, 21 nt, artificial
  Oligomer
gaugacucucauucaugcucu

SEQ ID NO: 5166 - RNA, 21 nt, artificial
  Oligomer
augacucucauucaugcucuc

SEQ ID NO: 5167 - RNA, 21 nt, artificial
  Oligomer
auugucaugaucacuccagug

SEQ ID NO: 5168 - RNA, 21 nt, artificial
  Oligomer
gaugggauuuagccaagaacc

SEQ ID NO: 5169 - RNA, 21 nt, artificial
  Oligomer
uucucaucaugagauaggcug

SEQ ID NO: 5170 - RNA, 21 nt, artificial
  Oligomer
uugacccaaggauuuuucuug

SEQ ID NO: 5171 - RNA, 21 nt, artificial
  Oligomer
ugacccaaggauuuuucuugu

SEQ ID NO: 5172 - RNA, 21 nt, artificial
  Oligomer
gugacaguaaacauguacacu

SEQ ID NO: 5173 - RNA, 21 nt, artificial
  Oligomer
gacaguaaacauguacacugu

SEQ ID NO: 5174 - RNA, 21 nt, artificial
  Oligomer
aaacauguacacuguuggugu

SEQ ID NO: 5175 - RNA, 21 nt, artificial
  Oligomer
aaaucaccugggauuaguugu

SEQ ID NO: 5176 - RNA, 21 nt, artificial
  Oligomer
ugcuacagucauggcugucca

SEQ ID NO: 5177 - RNA, 21 nt, artificial
  Oligomer
ccuuucuaggauccagacugg

SEQ ID NO: 5178 - RNA, 21 nt, artificial
  Oligomer
uugucaagaggugguuuggag

SEQ ID NO: 5179 - RNA, 21 nt, artificial
  Oligomer
guuuucuguuucagaccuguc

SEQ ID NO: 5180 - RNA, 21 nt, artificial
  Oligomer
uuuucuguuucagaccuguca

SEQ ID NO: 5181 - RNA, 21 nt, artificial
  Oligomer
uucagaccugucacgauguca

SEQ ID NO: 5182 - RNA, 21 nt, artificial
  Oligomer
ucuaggcaacagggaagauuc

SEQ ID NO: 5183 - RNA, 21 nt, artificial
  Oligomer
ugaccaacaauauugcugucc

SEQ ID NO: 5184 - RNA, 21 nt, artificial
  Oligomer
guuccagggaagucaacaggu

SEQ ID NO: 5185 - RNA, 21 nt, artificial
  Oligomer
gucaacagguuguugaaccag

SEQ ID NO: 5186 - RNA, 21 nt, artificial
  Oligomer
uuugagguuguggucugcaca

SEQ ID NO: 5187 - RNA, 21 nt, artificial
  Oligomer
gauucagcaauccggauucug

SEQ ID NO: 5188 - RNA, 21 nt, artificial
  Oligomer
cuggaaaacauccucacuggc

SEQ ID NO: 5189 - RNA, 21 nt, artificial
  Oligomer
agggaccauccacuucaaucc

SEQ ID NO: 5190 - RNA, 21 nt, artificial
  Oligomer
agaagaaaucuuccucuggag

SEQ ID NO: 5191 - RNA, 21 nt, artificial
  Oligomer
ucugcaauuccaaaacuuugg

SEQ ID NO: 5192 - RNA, 21 nt, artificial
  Oligomer
cugcaauuccaaaacuuugga

SEQ ID NO: 5193 - RNA, 21 nt, artificial
  Oligomer
uuccaaaacuuuggaugggug

SEQ ID NO: 5194 - RNA, 21 nt, artificial
  Oligomer
ugguaaucacaaccuucugcu

SEQ ID NO: 5195 - RNA, 21 nt, artificial
  Oligomer
aaaaccggaggauccuuucac

SEQ ID NO: 5196 - RNA, 21 nt, artificial
  Oligomer
cuucucuggacagaacugugc

SEQ ID NO: 5197 - RNA, 21 nt, artificial
  Oligomer
aaacuuagggcgccuacagug

SEQ ID NO: 5198 - RNA, 21 nt, artificial
  Oligomer
ugcgaggaugacucucauuca

SEQ ID NO: 5199 - RNA, 21 nt, artificial
  Oligomer
aacuccuccggaugaacucag

SEQ ID NO: 5200 - RNA, 21 nt, artificial
  Oligomer
aucaaggcuauugucaugauc

SEQ ID NO: 5201 - RNA, 21 nt, artificial
  Oligomer
ugucggcuucugcuauagcag

SEQ ID NO: 5202 - RNA, 21 nt, artificial
  Oligomer
guauguaggcagaucauauag

SEQ ID NO: 5203 - RNA, 21 nt, artificial
  Oligomer
aguuccugggaaugaauaagu

SEQ ID NO: 5204 - RNA, 21 nt, artificial
  Oligomer
uugcuuucucagugugcggcu

SEQ ID NO: 5205 - RNA, 21 nt, artificial
  Oligomer
auugcgacacacaggaagcag

SEQ ID NO: 5206 - RNA, 21 nt, artificial
  Oligomer
guaaacauguacacuguuggu

SEQ ID NO: 5207 - RNA, 21 nt, artificial
  Oligomer
ugaaaaccagugguuaaccac

SEQ ID NO: 5208 - RNA, 21 nt, artificial
  Oligomer
ggaauugauaaaaucaccugg

SEQ ID NO: 5209 - RNA, 21 nt, artificial
  Oligomer
caguuauuuuucugagaaagg

SEQ ID NO: 5210 - RNA, 21 nt, artificial
  Oligomer
uucugagaaaggauccauggg

SEQ ID NO: 5211 - RNA, 21 nt, artificial
  Oligomer
ugguuaaccacccaguuuccc

SEQ ID NO: 5212 - RNA, 21 nt, artificial
  Oligomer
aaguugcugaagcucaaguaa

SEQ ID NO: 5213 - RNA, 21 nt, artificial
  Oligomer
uagaauugaaccuuucuagga

SEQ ID NO: 5214 - RNA, 21 nt, artificial
  Oligomer
aaguuuaaugcugcaugacca

SEQ ID NO: 5215 - RNA, 21 nt, artificial
  Oligomer
ugcaugaccaacaauauugcu

SEQ ID NO: 5216 - RNA, 21 nt, artificial
  Oligomer
cagggaagauucagcaauccg

SEQ ID NO: 5217 - RNA, 21 nt, artificial
  Oligomer
agggaagucaacagguuguug

SEQ ID NO: 5218 - RNA, 21 nt, artificial
  Oligomer
cagauccaguagaaauagauc

SEQ ID NO: 5219 - RNA, 21 nt, artificial
  Oligomer
uggacagaacugugcuaucag

SEQ ID NO: 5220 - RNA, 21 nt, artificial
  Oligomer
uuuugagguuguggucugcac

SEQ ID NO: 5221 - RNA, 21 nt, artificial
  Oligomer
uucagcaauccggauucugga

SEQ ID NO: 5222 - RNA, 21 nt, artificial
  Oligomer
agcacagccacuucauacugg

SEQ ID NO: 5223 - RNA, 21 nt, artificial
  Oligomer
uucaauccugggaauugguga

SEQ ID NO: 5224 - RNA, 21 nt, artificial
  Oligomer
ugcaauuccaaaacuuuggau

SEQ ID NO: 5225 - RNA, 21 nt, artificial
  Oligomer
acaaccuugguaaucacaacc

SEQ ID NO: 5226 - RNA, 21 nt, artificial
  Oligomer
uaaagaaugaccggugcaagg

SEQ ID NO: 5227 - RNA, 21 nt, artificial
  Oligomer
aggaugacucucauucaugcu

SEQ ID NO: 5228 - RNA, 21 nt, artificial
  Oligomer
aucccuaagccaaggauauag

SEQ ID NO: 5229 - RNA, 21 nt, artificial
  Oligomer
uaaaaagguggugaguauacc

SEQ ID NO: 5230 - RNA, 21 nt, artificial
  Oligomer
ggcuauugucaugaucacucc

SEQ ID NO: 5231 - RNA, 21 nt, artificial
  Oligomer
ugucaugaucacuccagugag

SEQ ID NO: 5232 - RNA, 21 nt, artificial
  Oligomer
augggauuuagccaagaaccc

SEQ ID NO: 5233 - RNA, 21 nt, artificial
  Oligomer
ugugaaaaacacacaccuacc

SEQ ID NO: 5234 - RNA, 21 nt, artificial
  Oligomer
auugcuuucucagugugcggc

SEQ ID NO: 5235 - RNA, 21 nt, artificial
  Oligomer
gugcuguuaaaauucaagcag

SEQ ID NO: 5236 - RNA, 21 nt, artificial
  Oligomer
acccaaggauuuuucuugugu

SEQ ID NO: 5237 - RNA, 21 nt, artificial
  Oligomer
ccuacuuaggaaaucuucugu

SEQ ID NO: 5238 - RNA, 21 nt, artificial
  Oligomer
cuuuaagaacuucagaaguuc

SEQ ID NO: 5239 - RNA, 21 nt, artificial
  Oligomer
acuucagaaguucuuaaguug

SEQ ID NO: 5240 - RNA, 21 nt, artificial
  Oligomer
uucuuaaguugcugaagcuca

SEQ ID NO: 5241 - RNA, 21 nt, artificial
  Oligomer
auccagacuggaauaucggug

SEQ ID NO: 5242 - RNA, 21 nt, artificial
  Oligomer
uccagacuggaauaucgguga

SEQ ID NO: 5243 - RNA, 21 nt, artificial
  Oligomer
auugucaagaggugguuugga

SEQ ID NO: 5244 - RNA, 21 nt, artificial
  Oligomer
aacucauugucccacauuggu

SEQ ID NO: 5245 - RNA, 21 nt, artificial
  Oligomer
uugaaccaggaaaaggcaccu

SEQ ID NO: 5246 - RNA, 21 nt, artificial
  Oligomer
cauacuggaaaacauccucac

SEQ ID NO: 5247 - RNA, 21 nt, artificial
  Oligomer
cacuucaauccugggaauugg

SEQ ID NO: 5248 - RNA, 21 nt, artificial
  Oligomer
acuucaauccugggaauuggu

SEQ ID NO: 5249 - RNA, 21 nt, artificial
  Oligomer
gaagccacgcuuguucaucug

SEQ ID NO: 5250 - RNA, 21 nt, artificial
  Oligomer
ugggugcauaacaaccuuggu

SEQ ID NO: 5251 - RNA, 21 nt, artificial
  Oligomer
caaccuugguaaucacaaccu

SEQ ID NO: 5252 - RNA, 21 nt, artificial
  Oligomer
aucacaaccuucugcugggag

SEQ ID NO: 5253 - RNA, 21 nt, artificial
  Oligomer
aaagaaugaccggugcaagga

SEQ ID NO: 5254 - RNA, 21 nt, artificial
  Oligomer
aaguuaccaugagaaucaagg

SEQ ID NO: 5255 - RNA, 21 nt, artificial
  Oligomer
gaaucaaggcuauugucauga

SEQ ID NO: 5256 - RNA, 21 nt, artificial
  Oligomer
aaucaaggcuauugucaugau

SEQ ID NO: 5257 - RNA, 21 nt, artificial
  Oligomer
ucaaggcuauugucaugauca

SEQ ID NO: 5258 - RNA, 21 nt, artificial
  Oligomer
augugaaaaacacacaccuac

SEQ ID NO: 5259 - RNA, 21 nt, artificial
  Oligomer
gugaaaaacacacaccuaccc

SEQ ID NO: 5260 - RNA, 21 nt, artificial
  Oligomer
aggcagaucauauaggccacc

SEQ ID NO: 5261 - RNA, 21 nt, artificial
  Oligomer
agcuuguggaaggugagguug

SEQ ID NO: 5262 - RNA, 21 nt, artificial
  Oligomer
gaauaaguuuauuccgccuuc

SEQ ID NO: 5263 - RNA, 21 nt, artificial
  Oligomer
cuguucacacuggauaagacc

SEQ ID NO: 5264 - RNA, 21 nt, artificial
  Oligomer
acacuggauaagaccauauca

SEQ ID NO: 5265 - RNA, 21 nt, artificial
  Oligomer
gaaccuuucuaggauccagac

SEQ ID NO: 5266 - RNA, 21 nt, artificial
  Oligomer
cuuucuaggauccagacugga

SEQ ID NO: 5267 - RNA, 21 nt, artificial
  Oligomer
gacuggaauaucggugacagc

SEQ ID NO: 5268 - RNA, 21 nt, artificial
  Oligomer
uugucccacauuggucuccca

SEQ ID NO: 5269 - RNA, 21 nt, artificial
  Oligomer
ucuguuucagaccugucacga

SEQ ID NO: 5270 - RNA, 21 nt, artificial
  Oligomer
guuucagaccugucacgaugu

SEQ ID NO: 5271 - RNA, 21 nt, artificial
  Oligomer
ucacgaugucaguggccuugu

SEQ ID NO: 5272 - RNA, 21 nt, artificial
  Oligomer
acgaugucaguggccuuguca

SEQ ID NO: 5273 - RNA, 21 nt, artificial
  Oligomer
uaaaaccggaggauccuuuca

SEQ ID NO: 5274 - RNA, 21 nt, artificial
  Oligomer
guggugaguauaccagaagac

SEQ ID NO: 5275 - RNA, 21 nt, artificial
  Oligomer
ugagaaucaaggcuauuguca

SEQ ID NO: 5276 - RNA, 21 nt, artificial
  Oligomer
uugucaugaucacuccaguga

SEQ ID NO: 5277 - RNA, 21 nt, artificial
  Oligomer
cauauaggccaccagcuugug

SEQ ID NO: 5278 - RNA, 21 nt, artificial
  Oligomer
caauugcuuucucagugugcg

SEQ ID NO: 5279 - RNA, 21 nt, artificial
  Oligomer
uggaauugauaaaaucaccug

SEQ ID NO: 5280 - RNA, 21 nt, artificial
  Oligomer
accaaaccucugcuaucaagc

SEQ ID NO: 5281 - RNA, 21 nt, artificial
  Oligomer
uaaguugcugaagcucaagua

SEQ ID NO: 5282 - RNA, 21 nt, artificial
  Oligomer
aauaccagggagucaaggcuu

SEQ ID NO: 5283 - RNA, 21 nt, artificial
  Oligomer
cucccaaaggagguuuucugu

SEQ ID NO: 5284 - RNA, 21 nt, artificial
  Oligomer
uucuguuucagaccugucacg

SEQ ID NO: 5285 - RNA, 21 nt, artificial
  Oligomer
gaccaacaauauugcuguccc

SEQ ID NO: 5286 - RNA, 21 nt, artificial
  Oligomer
uauugcugucccauccgguga

SEQ ID NO: 5287 - RNA, 21 nt, artificial
  Oligomer
ugaaccaggaaaaggcaccug

SEQ ID NO: 5288 - RNA, 21 nt, artificial
  Oligomer
uacuggaaaacauccucacug

SEQ ID NO: 5289 - RNA, 21 nt, artificial
  Oligomer
gaaaacauccucacuggcugu

SEQ ID NO: 5290 - RNA, 21 nt, artificial
  Oligomer
uuggaugggugcauaacaacc

SEQ ID NO: 5291 - RNA, 21 nt, artificial
  Oligomer
uucaugcucuccucuguuuga

SEQ ID NO: 5292 - RNA, 21 nt, artificial
  Oligomer
aucauauaggccaccagcuug

SEQ ID NO: 5293 - RNA, 21 nt, artificial
  Oligomer
aguaaacauguacacuguugg

SEQ ID NO: 5294 - RNA, 21 nt, artificial
  Oligomer
cucaggagaugguaacacugg

SEQ ID NO: 5295 - RNA, 21 nt, artificial
  Oligomer
auaccagggagucaaggcuug

SEQ ID NO: 5296 - RNA, 21 nt, artificial
  Oligomer
auauugcugucccauccggug

SEQ ID NO: 5297 - RNA, 21 nt, artificial
  Oligomer
gaaccaggaaaaggcaccugu

SEQ ID NO: 5298 - RNA, 21 nt, artificial
  Oligomer
caugcucuccucuguuugacc

SEQ ID NO: 5299 - RNA, 21 nt, artificial
  Oligomer
uaaacauguacacuguuggug

SEQ ID NO: 5300 - RNA, 21 nt, artificial
  Oligomer
cuggaauugauaaaaucaccu

SEQ ID NO: 5301 - RNA, 21 nt, artificial
  Oligomer
aaaggauccaugggcuuuaag

SEQ ID NO: 5302 - RNA, 21 nt, artificial
  Oligomer
gaacuucagaaguucuuaagu

SEQ ID NO: 5303 - RNA, 21 nt, artificial
  Oligomer
uuggucucccaaaggagguuu

SEQ ID NO: 5304 - RNA, 21 nt, artificial
  Oligomer
caaaggagguuuucuguuuca

SEQ ID NO: 5305 - RNA, 21 nt, artificial
  Oligomer
aaggagguuuucuguuucaga

SEQ ID NO: 5306 - RNA, 21 nt, artificial
  Oligomer
agguuuucuguuucagaccug

SEQ ID NO: 5307 - RNA, 21 nt, artificial
  Oligomer
aagaaaucuuccucuggagca

SEQ ID NO: 5308 - RNA, 21 nt, artificial
  Oligomer
aaucacaaccuucugcuggga

SEQ ID NO: 5309 - RNA, 21 nt, artificial
  Oligomer
uugcuacagucauggcugucc

SEQ ID NO: 5310 - RNA, 21 nt, artificial
  Oligomer
accagauggauuucaagauag

SEQ ID NO: 5311 - RNA, 21 nt, artificial
  Oligomer
uucauacuggaaaacauccuc

SEQ ID NO: 5312 - RNA, 21 nt, artificial
  Oligomer
aggauuuuucuuguguaguag

SEQ ID NO: 5313 - RNA, 21 nt, artificial
  Oligomer
ucauacuggaaaacauccuca

SEQ ID NO: 5314 - RNA, 21 nt, artificial
  Oligomer
uaaucacaaccuucugcuggg

SEQ ID NO: 5315 - RNA, 21 nt, artificial
  Oligomer
caggaaggcauccacaaacag

SEQ ID NO: 5316 - RNA, 21 nt, artificial
  Oligomer
cagaaacaaaacugaaaacca

SEQ ID NO: 5317 - RNA, 21 nt, artificial
  Oligomer
guucuuaaguugcugaagcuc

SEQ ID NO: 5318 - RNA, 21 nt, artificial
  Oligomer
guaaaaccggaggauccuuuc

SEQ ID NO: 5319 - RNA, 21 nt, artificial
  Oligomer
aaggauccacuuccaagacuc

SEQ ID NO: 5320 - RNA, 21 nt, artificial
  Oligomer
aaauugcuguucacacuggau

SEQ ID NO: 5321 - RNA, 21 nt, artificial
  Oligomer
aguucuuaaguugcugaagcu

SEQ ID NO: 5322 - RNA, 21 nt, artificial
  Oligomer
gaagaaaucuuccucuggagc

SEQ ID NO: 5323 - RNA, 21 nt, artificial
  Oligomer
acucaguagcugaaguuacca

SEQ ID NO: 5324 - RNA, 21 nt, artificial
  Oligomer
aauauugcugucccauccggu

SEQ ID NO: 5325 - RNA, 21 nt, artificial
  Oligomer
aucacuccagugagaccagca

SEQ ID NO: 5326 - RNA, 21 nt, artificial
  Oligomer
agaaacaaaacugaaaaccag

SEQ ID NO: 5327 - RNA, 21 nt, artificial
  Oligomer
auugcuguucacacuggauaa

SEQ ID NO: 5328 - RNA, 21 nt, artificial
  Oligomer
ccagaaacaaaacugaaaacc

SEQ ID NO: 5329 - RNA, 21 nt, artificial
  Oligomer
aaacaaaacugaaaaccagug

SEQ ID NO: 5330 - RNA, 21 nt, artificial
  Oligomer
cacauuggucucccaaaggag

SEQ ID NO: 5331 - RNA, 21 nt, artificial
  Oligomer
aauuccugcuccaaccagcac

SEQ ID NO: 5332 - RNA, 21 nt, artificial
  Oligomer
acuucauacuggaaaacaucc

SEQ ID NO: 5333 - RNA, 21 nt, artificial
  Oligomer
caauuccugcuccaaccagca

SEQ ID NO: 5334 - RNA, 21 nt, artificial
  Oligomer
aggauccacuuccaagacuca

SEQ ID NO: 5335 - RNA, 21 nt, artificial
  Oligomer
augaacucaguagcugaaguu

SEQ ID NO: 5336 - RNA, 21 nt, artificial
  Oligomer
aacucaguagcugaaguuacc

SEQ ID NO: 5337 - RNA, 19 nt, artificial
  Oligomer
ggguuuucuuuuuguucuu

SEQ ID NO: 5338 - RNA, 19 nt, artificial
  Oligomer
ccagaucauuaggacauaa

SEQ ID NO: 5339 - RNA, 19 nt, artificial
  Oligomer
gccucauauuaauuaucac

SEQ ID NO: 5340 - RNA, 19 nt, artificial
  Oligomer
gcauaauuaaaaccagcuu

SEQ ID NO: 5341 - RNA, 19 nt, artificial
  Oligomer
gcaggguuuucuuuuuguu

SEQ ID NO: 5342 - RNA, 19 nt, artificial
  Oligomer
ccaacugggauaaugaauu

SEQ ID NO: 5343 - RNA, 19 nt, artificial
  Oligomer
gggucucauauuggucauu

SEQ ID NO: 5344 - RNA, 19 nt, artificial
  Oligomer
ggauaaugaauucaagaca

SEQ ID NO: 5345 - RNA, 19 nt, artificial
  Oligomer
gccugaauuucaacugcau

SEQ ID NO: 5346 - RNA, 19 nt, artificial
  Oligomer
cgcugugccucauauuaau

SEQ ID NO: 5347 - RNA, 19 nt, artificial
  Oligomer
cuaaccuaugugcauaauu

SEQ ID NO: 5348 - RNA, 19 nt, artificial
  Oligomer
caauucaucuauucaacag

SEQ ID NO: 5349 - RNA, 19 nt, artificial
  Oligomer
gugugacuaaugguuuauu

SEQ ID NO: 5350 - RNA, 19 nt, artificial
  Oligomer
accacacaaugccaagaua

SEQ ID NO: 5351 - RNA, 19 nt, artificial
  Oligomer
gccucagaauccucaaaau

SEQ ID NO: 5352 - RNA, 19 nt, artificial
  Oligomer
gaaacccugaguaaacaaa

SEQ ID NO: 5353 - RNA, 19 nt, artificial
  Oligomer
ccaacuaaguuaugaaagu

SEQ ID NO: 5354 - RNA, 19 nt, artificial
  Oligomer
ccauugcacaucuauuuaa

SEQ ID NO: 5355 - RNA, 19 nt, artificial
  Oligomer
cagguaucaauucaucuau

SEQ ID NO: 5356 - RNA, 19 nt, artificial
  Oligomer
cgaauauagccuuucugaa

SEQ ID NO: 5357 - RNA, 19 nt, artificial
  Oligomer
ggccugcugugcgaauaua

SEQ ID NO: 5358 - RNA, 19 nt, artificial
  Oligomer
aggguuuucuuuuuguucu

SEQ ID NO: 5359 - RNA, 19 nt, artificial
  Oligomer
cccuuaugaauauugaacu

SEQ ID NO: 5360 - RNA, 19 nt, artificial
  Oligomer
cuaauuuccugcccaaagu

SEQ ID NO: 5361 - RNA, 19 nt, artificial
  Oligomer
caacacccuaauaccagaa

SEQ ID NO: 5362 - RNA, 19 nt, artificial
  Oligomer
gggauaaugaauucaagac

SEQ ID NO: 5363 - RNA, 19 nt, artificial
  Oligomer
acugggauaaugaauucaa

SEQ ID NO: 5364 - RNA, 19 nt, artificial
  Oligomer
ccauccggaggucuuacuu

SEQ ID NO: 5365 - RNA, 19 nt, artificial
  Oligomer
gugccucauauuaauuauc

SEQ ID NO: 5366 - RNA, 19 nt, artificial
  Oligomer
cugugccucauauuaauua

SEQ ID NO: 5367 - RNA, 19 nt, artificial
  Oligomer
ccgagucaauaauucugau

SEQ ID NO: 5368 - RNA, 19 nt, artificial
  Oligomer
ggcuuuguaugugaauaau

SEQ ID NO: 5369 - RNA, 19 nt, artificial
  Oligomer
ucuaaccuaugugcauaau

SEQ ID NO: 5370 - RNA, 19 nt, artificial
  Oligomer
ucagguaucaauucaucua

SEQ ID NO: 5371 - RNA, 19 nt, artificial
  Oligomer
cccagauuucuuaaaguuu

SEQ ID NO: 5372 - RNA, 19 nt, artificial
  Oligomer
gagccacaaauguuuagaa

SEQ ID NO: 5373 - RNA, 19 nt, artificial
  Oligomer
agagcaggguuuucuuuuu

SEQ ID NO: 5374 - RNA, 19 nt, artificial
  Oligomer
ucaucaucaucauccuaaa

SEQ ID NO: 5375 - RNA, 19 nt, artificial
  Oligomer
cugugugacuaaugguuua

SEQ ID NO: 5376 - RNA, 19 nt, artificial
  Oligomer
cugggauaaugaauucaag

SEQ ID NO: 5377 - RNA, 19 nt, artificial
  Oligomer
ucgagcuacagaugaagaa

SEQ ID NO: 5378 - RNA, 19 nt, artificial
  Oligomer
ggucuuacuuugaagucuu

SEQ ID NO: 5379 - RNA, 19 nt, artificial
  Oligomer
gggaauucuuaaaacugug

SEQ ID NO: 5380 - RNA, 19 nt, artificial
  Oligomer
gagugcuugucauuauaaa

SEQ ID NO: 5381 - RNA, 19 nt, artificial
  Oligomer
gggacuaggaugaacuaaa

SEQ ID NO: 5382 - RNA, 19 nt, artificial
  Oligomer
ggagaaaagagaaugggag

SEQ ID NO: 5383 - RNA, 19 nt, artificial
  Oligomer
ggagccacaaauguuuaga

SEQ ID NO: 5384 - RNA, 19 nt, artificial
  Oligomer
cccuuauuuuccguaaaua

SEQ ID NO: 5385 - RNA, 19 nt, artificial
  Oligomer
gcccuuaugaauauugaac

SEQ ID NO: 5386 - RNA, 19 nt, artificial
  Oligomer
aaccacacaaugccaagau

SEQ ID NO: 5387 - RNA, 19 nt, artificial
  Oligomer
ugaauuuagaaccacacaa

SEQ ID NO: 5388 - RNA, 19 nt, artificial
  Oligomer
acauuuauguggagcucua

SEQ ID NO: 5389 - RNA, 19 nt, artificial
  Oligomer
ugaaacccugaguaaacaa

SEQ ID NO: 5390 - RNA, 19 nt, artificial
  Oligomer
cugaaacccugaguaaaca

SEQ ID NO: 5391 - RNA, 19 nt, artificial
  Oligomer
ggcugugcauaauauaaca

SEQ ID NO: 5392 - RNA, 19 nt, artificial
  Oligomer
gucuuacuuugaagucuuu

SEQ ID NO: 5393 - RNA, 19 nt, artificial
  Oligomer
uuaaaacugugcucaacua

SEQ ID NO: 5394 - RNA, 19 nt, artificial
  Oligomer
aggcuuuguaugugaauaa

SEQ ID NO: 5395 - RNA, 19 nt, artificial
  Oligomer
gcauuuauuaacagguacu

SEQ ID NO: 5396 - RNA, 19 nt, artificial
  Oligomer
ugugcauaauuaaaaccag

SEQ ID NO: 5397 - RNA, 19 nt, artificial
  Oligomer
uucuaaccuaugugcauaa

SEQ ID NO: 5398 - RNA, 19 nt, artificial
  Oligomer
ucaauucuuuacaccaaag

SEQ ID NO: 5399 - RNA, 19 nt, artificial
  Oligomer
gaauauagccuuucugaaa

SEQ ID NO: 5400 - RNA, 19 nt, artificial
  Oligomer
ggucucauauuggucauuc

SEQ ID NO: 5401 - RNA, 19 nt, artificial
  Oligomer
ccaagagcaggguuuucuu

SEQ ID NO: 5402 - RNA, 19 nt, artificial
  Oligomer
ccacacaaugccaagauag

SEQ ID NO: 5403 - RNA, 19 nt, artificial
  Oligomer
uggauugauuggaguuaau

SEQ ID NO: 5404 - RNA, 19 nt, artificial
  Oligomer
ccagguuugauacucuuuc

SEQ ID NO: 5405 - RNA, 19 nt, artificial
  Oligomer
cuccagguuugauacucuu

SEQ ID NO: 5406 - RNA, 19 nt, artificial
  Oligomer
ucaaaagguucaguaacuu

SEQ ID NO: 5407 - RNA, 19 nt, artificial
  Oligomer
ggaucaaaagguucaguaa

SEQ ID NO: 5408 - RNA, 19 nt, artificial
  Oligomer
gcauuucauuuucaacaag

SEQ ID NO: 5409 - RNA, 19 nt, artificial
  Oligomer
gaauucaagacaauugcaa

SEQ ID NO: 5410 - RNA, 19 nt, artificial
  Oligomer
ggaugagucucaggccaau

SEQ ID NO: 5411 - RNA, 19 nt, artificial
  Oligomer
gccagaugcaggaaaggaa

SEQ ID NO: 5412 - RNA, 19 nt, artificial
  Oligomer
gagcuacagaugaagaaga

SEQ ID NO: 5413 - RNA, 19 nt, artificial
  Oligomer
gcgguuuuggcgaucucaa

SEQ ID NO: 5414 - RNA, 19 nt, artificial
  Oligomer
ggaggucuuacuuugaagu

SEQ ID NO: 5415 - RNA, 19 nt, artificial
  Oligomer
cggaggucuuacuuugaag

SEQ ID NO: 5416 - RNA, 19 nt, artificial
  Oligomer
aucacuuccuccaccaaaa

SEQ ID NO: 5417 - RNA, 19 nt, artificial
  Oligomer
gcaggcuuuguaugugaau

SEQ ID NO: 5418 - RNA, 19 nt, artificial
  Oligomer
agagugcuugucauuauaa

SEQ ID NO: 5419 - RNA, 19 nt, artificial
  Oligomer
cuaucuucaaaaccaacua

SEQ ID NO: 5420 - RNA, 19 nt, artificial
  Oligomer
gcccuuucuaaccuaugug

SEQ ID NO: 5421 - RNA, 19 nt, artificial
  Oligomer
accucagguaucaauucau

SEQ ID NO: 5422 - RNA, 19 nt, artificial
  Oligomer
agcaggguuuucuuuuugu

SEQ ID NO: 5423 - RNA, 19 nt, artificial
  Oligomer
auaaaaugguggcauggau

SEQ ID NO: 5424 - RNA, 19 nt, artificial
  Oligomer
ugugugacuaaugguuuau

SEQ ID NO: 5425 - RNA, 19 nt, artificial
  Oligomer
agcuagcccuuaugaauau

SEQ ID NO: 5426 - RNA, 19 nt, artificial
  Oligomer
gacuaauuuccugcccaaa

SEQ ID NO: 5427 - RNA, 19 nt, artificial
  Oligomer
gcaugaaaaaagaggguug

SEQ ID NO: 5428 - RNA, 19 nt, artificial
  Oligomer
acaaugccaagauagaauu

SEQ ID NO: 5429 - RNA, 19 nt, artificial
  Oligomer
cacaaugccaagauagaau

SEQ ID NO: 5430 - RNA, 19 nt, artificial
  Oligomer
gaaccacacaaugccaaga

SEQ ID NO: 5431 - RNA, 19 nt, artificial
  Oligomer
acauaauacauguugagag

SEQ ID NO: 5432 - RNA, 19 nt, artificial
  Oligomer
ggaguagcuauauauuucu

SEQ ID NO: 5433 - RNA, 19 nt, artificial
  Oligomer
ugccucagaauccucaaaa

SEQ ID NO: 5434 - RNA, 19 nt, artificial
  Oligomer
ggagcucuaugguuuugag

SEQ ID NO: 5435 - RNA, 19 nt, artificial
  Oligomer
gcugaaacccugaguaaac

SEQ ID NO: 5436 - RNA, 19 nt, artificial
  Oligomer
ucaacacccuaauaccaga

SEQ ID NO: 5437 - RNA, 19 nt, artificial
  Oligomer
ccaccuaaguucuuuuaca

SEQ ID NO: 5438 - RNA, 19 nt, artificial
  Oligomer
cgagcuacagaugaagaag

SEQ ID NO: 5439 - RNA, 19 nt, artificial
  Oligomer
gcugugccucauauuaauu

SEQ ID NO: 5440 - RNA, 19 nt, artificial
  Oligomer
ggcaaaaugaaaguuaucu

SEQ ID NO: 5441 - RNA, 19 nt, artificial
  Oligomer
caggcaaaaugaaaguuau

SEQ ID NO: 5442 - RNA, 19 nt, artificial
  Oligomer
acaggcaaaaugaaaguua

SEQ ID NO: 5443 - RNA, 19 nt, artificial
  Oligomer
gucaauaauucugauccuu

SEQ ID NO: 5444 - RNA, 19 nt, artificial
  Oligomer
cccgagucaauaauucuga

SEQ ID NO: 5445 - RNA, 19 nt, artificial
  Oligomer
cugugcucaacuauuaaaa

SEQ ID NO: 5446 - RNA, 19 nt, artificial
  Oligomer
gaauucuuaaaacugugcu

SEQ ID NO: 5447 - RNA, 19 nt, artificial
  Oligomer
ggaauucuuaaaacugugc

SEQ ID NO: 5448 - RNA, 19 nt, artificial
  Oligomer
ucuuaguucuucugcuuuu

SEQ ID NO: 5449 - RNA, 19 nt, artificial
  Oligomer
gugcuugucauuauaaaag

SEQ ID NO: 5450 - RNA, 19 nt, artificial
  Oligomer
guuauaaggagucugagaa

SEQ ID NO: 5451 - RNA, 19 nt, artificial
  Oligomer
gcucuguuuauuguuucaa

SEQ ID NO: 5452 - RNA, 19 nt, artificial
  Oligomer
ccucagguaucaauucauc

SEQ ID NO: 5453 - RNA, 19 nt, artificial
  Oligomer
gccuuucugaaauguacca

SEQ ID NO: 5454 - RNA, 19 nt, artificial
  Oligomer
ggaugaacuaaauaagaac

SEQ ID NO: 5455 - RNA, 19 nt, artificial
  Oligomer
cacaaauguuuagaacucu

SEQ ID NO: 5456 - RNA, 19 nt, artificial
  Oligomer
gccacaaauguuuagaacu

SEQ ID NO: 5457 - RNA, 19 nt, artificial
  Oligomer
agccacaaauguuuagaac

SEQ ID NO: 5458 - RNA, 19 nt, artificial
  Oligomer
gagcaggguuuucuuuuug

SEQ ID NO: 5459 - RNA, 19 nt, artificial
  Oligomer
cucaauaguauguucugaa

SEQ ID NO: 5460 - RNA, 19 nt, artificial
  Oligomer
acaacccagaaacaaaaau

SEQ ID NO: 5461 - RNA, 19 nt, artificial
  Oligomer
ggaauugugacaaauaugu

SEQ ID NO: 5462 - RNA, 19 nt, artificial
  Oligomer
gcuagcccuuaugaauauu

SEQ ID NO: 5463 - RNA, 19 nt, artificial
  Oligomer
cuccuugugcuauaaaaua

SEQ ID NO: 5464 - RNA, 19 nt, artificial
  Oligomer
gcuccuugugcuauaaaau

SEQ ID NO: 5465 - RNA, 19 nt, artificial
  Oligomer
gccaucauuauuaucauac

SEQ ID NO: 5466 - RNA, 19 nt, artificial
  Oligomer
ccaucuuacuccagguuug

SEQ ID NO: 5467 - RNA, 19 nt, artificial
  Oligomer
aggaucaaaagguucagua

SEQ ID NO: 5468 - RNA, 19 nt, artificial
  Oligomer
gucgaaaucugcuguccuu

SEQ ID NO: 5469 - RNA, 19 nt, artificial
  Oligomer
gggaaaggaucaaaagguu

SEQ ID NO: 5470 - RNA, 19 nt, artificial
  Oligomer
ggaaaagauucuuggacuc

SEQ ID NO: 5471 - RNA, 19 nt, artificial
  Oligomer
gggaaaagauucuuggacu

SEQ ID NO: 5472 - RNA, 19 nt, artificial
  Oligomer
ccugaguaaacaaagcauc

SEQ ID NO: 5473 - RNA, 19 nt, artificial
  Oligomer
ucagucugguacaaauauu

SEQ ID NO: 5474 - RNA, 19 nt, artificial
  Oligomer
ugggacaauacauuuuugu

SEQ ID NO: 5475 - RNA, 19 nt, artificial
  Oligomer
gugggacaauacauuuuug

SEQ ID NO: 5476 - RNA, 19 nt, artificial
  Oligomer
agugggacaauacauuuuu

SEQ ID NO: 5477 - RNA, 19 nt, artificial
  Oligomer
ccggguuuaugauauucca

SEQ ID NO: 5478 - RNA, 19 nt, artificial
  Oligomer
ggaaaaauaaaggaaugcc

SEQ ID NO: 5479 - RNA, 19 nt, artificial
  Oligomer
ggcucuccauuuuugucau

SEQ ID NO: 5480 - RNA, 19 nt, artificial
  Oligomer
acgcugugccucauauuaa

SEQ ID NO: 5481 - RNA, 19 nt, artificial
  Oligomer
cgaaagagaauaaagaacc

SEQ ID NO: 5482 - RNA, 19 nt, artificial
  Oligomer
gaaugcccgagucaauaau

SEQ ID NO: 5483 - RNA, 19 nt, artificial
  Oligomer
caggcuuuguaugugaaua

SEQ ID NO: 5484 - RNA, 19 nt, artificial
  Oligomer
ggcucuguuuauuguuuca

SEQ ID NO: 5485 - RNA, 19 nt, artificial
  Oligomer
guuguucuuugucauacua

SEQ ID NO: 5486 - RNA, 19 nt, artificial
  Oligomer
ucaguuguucuuugucaua

SEQ ID NO: 5487 - RNA, 19 nt, artificial
  Oligomer
cucaguuguucuuugucau

SEQ ID NO: 5488 - RNA, 19 nt, artificial
  Oligomer
gaaaagagaaugggagagu

SEQ ID NO: 5489 - RNA, 19 nt, artificial
  Oligomer
gaaaaggaaauaaggagaa

SEQ ID NO: 5490 - RNA, 19 nt, artificial
  Oligomer
caaauguuuagaacucuuc

SEQ ID NO: 5491 - RNA, 19 nt, artificial
  Oligomer
gagucucuaaaucacuguu

SEQ ID NO: 5492 - RNA, 19 nt, artificial
  Oligomer
guaucugauauggucauuu

SEQ ID NO: 5493 - RNA, 19 nt, artificial
  Oligomer
agcaugaaaaaagaggguu

SEQ ID NO: 5494 - RNA, 19 nt, artificial
  Oligomer
acacaaugccaagauagaa

SEQ ID NO: 5495 - RNA, 19 nt, artificial
  Oligomer
cuacagaagaauauuggau

SEQ ID NO: 5496 - RNA, 19 nt, artificial
  Oligomer
accaaggaguagcuauaua

SEQ ID NO: 5497 - RNA, 19 nt, artificial
  Oligomer
cugccucagaauccucaaa

SEQ ID NO: 5498 - RNA, 19 nt, artificial
  Oligomer
ccacaauacugagcugccu

SEQ ID NO: 5499 - RNA, 19 nt, artificial
  Oligomer
uugauacucuuuccacaau

SEQ ID NO: 5500 - RNA, 19 nt, artificial
  Oligomer
guaaugguuuucccuuaaa

SEQ ID NO: 5501 - RNA, 19 nt, artificial
  Oligomer
ccaugaggaaauaaaugug

SEQ ID NO: 5502 - RNA, 19 nt, artificial
  Oligomer
ggagugcauuucauuuuca

SEQ ID NO: 5503 - RNA, 19 nt, artificial
  Oligomer
guaaacaaagcaucuccaa

SEQ ID NO: 5504 - RNA, 19 nt, artificial
  Oligomer
ggagaaagaugugaucaca

SEQ ID NO: 5505 - RNA, 19 nt, artificial
  Oligomer
ccauucucaagucagucug

SEQ ID NO: 5506 - RNA, 19 nt, artificial
  Oligomer
ucaagaugcguggaaacua

SEQ ID NO: 5507 - RNA, 19 nt, artificial
  Oligomer
aguuucaagaugcguggaa

SEQ ID NO: 5508 - RNA, 19 nt, artificial
  Oligomer
ggaguuucaagaugcgugg

SEQ ID NO: 5509 - RNA, 19 nt, artificial
  Oligomer
agacuucuuuaguauccau

SEQ ID NO: 5510 - RNA, 19 nt, artificial
  Oligomer
gaggaagacuucuuuagua

SEQ ID NO: 5511 - RNA, 19 nt, artificial
  Oligomer
aaaccaucgagcuacagau

SEQ ID NO: 5512 - RNA, 19 nt, artificial
  Oligomer
agagguuggugcgguuuug

SEQ ID NO: 5513 - RNA, 19 nt, artificial
  Oligomer
gagagguuggugcgguuuu

SEQ ID NO: 5514 - RNA, 19 nt, artificial
  Oligomer
gcucuccauuuuugucauu

SEQ ID NO: 5515 - RNA, 19 nt, artificial
  Oligomer
gugaacaaaaaaucucaga

SEQ ID NO: 5516 - RNA, 19 nt, artificial
  Oligomer
cacgcugugccucauauua

SEQ ID NO: 5517 - RNA, 19 nt, artificial
  Oligomer
gcccgagucaauaauucug

SEQ ID NO: 5518 - RNA, 19 nt, artificial
  Oligomer
gugcucaacuauuaaaaug

SEQ ID NO: 5519 - RNA, 19 nt, artificial
  Oligomer
acugugcucaacuauuaaa

SEQ ID NO: 5520 - RNA, 19 nt, artificial
  Oligomer
ugcaggcuuuguaugugaa

SEQ ID NO: 5521 - RNA, 19 nt, artificial
  Oligomer
gguuuuucuuaguucuucu

SEQ ID NO: 5522 - RNA, 19 nt, artificial
  Oligomer
agguuuuucuuaguucuuc

SEQ ID NO: 5523 - RNA, 19 nt, artificial
  Oligomer
gaagguuuuucuuaguucu

SEQ ID NO: 5524 - RNA, 19 nt, artificial
  Oligomer
gaaugaugaagcauuguuu

SEQ ID NO: 5525 - RNA, 19 nt, artificial
  Oligomer
agaaugaugaagcauuguu

SEQ ID NO: 5526 - RNA, 19 nt, artificial
  Oligomer
cuaagaaugaugaagcauu

SEQ ID NO: 5527 - RNA, 19 nt, artificial
  Oligomer
auauaagagugcuugucau

SEQ ID NO: 5528 - RNA, 19 nt, artificial
  Oligomer
gaauauaagagugcuuguc

SEQ ID NO: 5529 - RNA, 19 nt, artificial
  Oligomer
cccuuucuaaccuaugugc

SEQ ID NO: 5530 - RNA, 19 nt, artificial
  Oligomer
auauagccuuucugaaaug

SEQ ID NO: 5531 - RNA, 19 nt, artificial
  Oligomer
aggccugcugugcgaauau

SEQ ID NO: 5532 - RNA, 19 nt, artificial
  Oligomer
cuaggaugaacuaaauaag

SEQ ID NO: 5533 - RNA, 19 nt, artificial
  Oligomer
ggauuauucaagggacuag

SEQ ID NO: 5534 - RNA, 19 nt, artificial
  Oligomer
ggagagugagagaaaauaa

SEQ ID NO: 5535 - RNA, 19 nt, artificial
  Oligomer
gggagagugagagaaaaua

SEQ ID NO: 5536 - RNA, 19 nt, artificial
  Oligomer
agaaaagagaaugggagag

SEQ ID NO: 5537 - RNA, 19 nt, artificial
  Oligomer
ggaaauaaggagaaaagag

SEQ ID NO: 5538 - RNA, 19 nt, artificial
  Oligomer
ggaaaaggaaauaaggaga

SEQ ID NO: 5539 - RNA, 19 nt, artificial
  Oligomer
gaacucuucaacuucggua

SEQ ID NO: 5540 - RNA, 19 nt, artificial
  Oligomer
uggagccacaaauguuuag

SEQ ID NO: 5541 - RNA, 19 nt, artificial
  Oligomer
gguugaacgucuuccucuu

SEQ ID NO: 5542 - RNA, 19 nt, artificial
  Oligomer
caagagcaggguuuucuuu

SEQ ID NO: 5543 - RNA, 19 nt, artificial
  Oligomer
agucucuaaaucacuguua

SEQ ID NO: 5544 - RNA, 19 nt, artificial
  Oligomer
agagucucuaaaucacugu

SEQ ID NO: 5545 - RNA, 19 nt, artificial
  Oligomer
uaacaacccagaaacaaaa

SEQ ID NO: 5546 - RNA, 19 nt, artificial
  Oligomer
cuaaaauuaacaacccaga

SEQ ID NO: 5547 - RNA, 19 nt, artificial
  Oligomer
uccuaaaauuaacaaccca

SEQ ID NO: 5548 - RNA, 19 nt, artificial
  Oligomer
agcccuuaugaauauugaa

SEQ ID NO: 5549 - RNA, 19 nt, artificial
  Oligomer
ccagcuagcccuuaugaau

SEQ ID NO: 5550 - RNA, 19 nt, artificial
  Oligomer
caaugccaagauagaauua

SEQ ID NO: 5551 - RNA, 19 nt, artificial
  Oligomer
ggauugauuggaguuaaug

SEQ ID NO: 5552 - RNA, 19 nt, artificial
  Oligomer
gaauccucaaaaucaguuu

SEQ ID NO: 5553 - RNA, 19 nt, artificial
  Oligomer
caguggaaguuagggaaaa

SEQ ID NO: 5554 - RNA, 19 nt, artificial
  Oligomer
agagcacuuuuacaaacau

SEQ ID NO: 5555 - RNA, 19 nt, artificial
  Oligomer
gguuuugagagcacuuuua

SEQ ID NO: 5556 - RNA, 19 nt, artificial
  Oligomer
acugcaugcugauucucuu

SEQ ID NO: 5557 - RNA, 19 nt, artificial
  Oligomer
ugugaucacaggccugaaa

SEQ ID NO: 5558 - RNA, 19 nt, artificial
  Oligomer
ccaugaugaggagaaagau

SEQ ID NO: 5559 - RNA, 19 nt, artificial
  Oligomer
ugaauuucaacugcaugcu

SEQ ID NO: 5560 - RNA, 19 nt, artificial
  Oligomer
cgcauccauucucaaguca

SEQ ID NO: 5561 - RNA, 19 nt, artificial
  Oligomer
cccuucgcauccauucuca

SEQ ID NO: 5562 - RNA, 19 nt, artificial
  Oligomer
guuucaagaugcguggaaa

SEQ ID NO: 5563 - RNA, 19 nt, artificial
  Oligomer
gcaggaguuucaagaugcg

SEQ ID NO: 5564 - RNA, 19 nt, artificial
  Oligomer
aggaagacuucuuuaguau

SEQ ID NO: 5565 - RNA, 19 nt, artificial
  Oligomer
ccauguuucuguaucucug

SEQ ID NO: 5566 - RNA, 19 nt, artificial
  Oligomer
uggcugugcauaauauaac

SEQ ID NO: 5567 - RNA, 19 nt, artificial
  Oligomer
gguacacacaucaucucuu

SEQ ID NO: 5568 - RNA, 19 nt, artificial
  Oligomer
aggucuuacuuugaagucu

SEQ ID NO: 5569 - RNA, 19 nt, artificial
  Oligomer
ggaguugucaucacgcugu

SEQ ID NO: 5570 - RNA, 19 nt, artificial
  Oligomer
ucgaaagagaauaaagaac

SEQ ID NO: 5571 - RNA, 19 nt, artificial
  Oligomer
ggagacaggcaaaaugaaa

SEQ ID NO: 5572 - RNA, 19 nt, artificial
  Oligomer
agucaauaauucugauccu

SEQ ID NO: 5573 - RNA, 19 nt, artificial
  Oligomer
ugaaugcccgagucaauaa

SEQ ID NO: 5574 - RNA, 19 nt, artificial
  Oligomer
gcuuuugcaauuguguuug

SEQ ID NO: 5575 - RNA, 19 nt, artificial
  Oligomer
ugaauauaagagugcuugu

SEQ ID NO: 5576 - RNA, 19 nt, artificial
  Oligomer
cucaguuauaaggagucug

SEQ ID NO: 5577 - RNA, 19 nt, artificial
  Oligomer
ucacaccauugcacaucua

SEQ ID NO: 5578 - RNA, 19 nt, artificial
  Oligomer
gccugcugugcgaauauag

SEQ ID NO: 5579 - RNA, 19 nt, artificial
  Oligomer
aggguaggucugacaaaua

SEQ ID NO: 5580 - RNA, 19 nt, artificial
  Oligomer
caguuguucuuugucauac

SEQ ID NO: 5581 - RNA, 19 nt, artificial
  Oligomer
gacuaggaugaacuaaaua

SEQ ID NO: 5582 - RNA, 19 nt, artificial
  Oligomer
gggauuauucaagggacua

SEQ ID NO: 5583 - RNA, 19 nt, artificial
  Oligomer
acauacugauguuguuuug

SEQ ID NO: 5584 - RNA, 19 nt, artificial
  Oligomer
gagagugagagaaaauaaa

SEQ ID NO: 5585 - RNA, 19 nt, artificial
  Oligomer
ugaggaagaaggagaaaga

SEQ ID NO: 5586 - RNA, 19 nt, artificial
  Oligomer
gaauauauguucaagagag

SEQ ID NO: 5587 - RNA, 19 nt, artificial
  Oligomer
caucaucaucauccuaaaa

SEQ ID NO: 5588 - RNA, 19 nt, artificial
  Oligomer
acuuaggaauugugacaaa

SEQ ID NO: 5589 - RNA, 19 nt, artificial
  Oligomer
cuagcccuuaugaauauug

SEQ ID NO: 5590 - RNA, 19 nt, artificial
  Oligomer
ugaaaaaagaggguuggag

SEQ ID NO: 5591 - RNA, 19 nt, artificial
  Oligomer
ggguucugcacauucuuau

SEQ ID NO: 5592 - RNA, 19 nt, artificial
  Oligomer
uuggauugauuggaguuaa

SEQ ID NO: 5593 - RNA, 19 nt, artificial
  Oligomer
gugucauuuuugccaucau

SEQ ID NO: 5594 - RNA, 19 nt, artificial
  Oligomer
agaauccucaaaaucaguu

SEQ ID NO: 5595 - RNA, 19 nt, artificial
  Oligomer
agguuugauacucuuucca

SEQ ID NO: 5596 - RNA, 19 nt, artificial
  Oligomer
uccagguuugauacucuuu

SEQ ID NO: 5597 - RNA, 19 nt, artificial
  Oligomer
guaacuucccuaagauuau

SEQ ID NO: 5598 - RNA, 19 nt, artificial
  Oligomer
caaaagggaaaggaucaaa

SEQ ID NO: 5599 - RNA, 19 nt, artificial
  Oligomer
aaagauucuuggacucaau

SEQ ID NO: 5600 - RNA, 19 nt, artificial
  Oligomer
ggaaguuagggaaaagauu

SEQ ID NO: 5601 - RNA, 19 nt, artificial
  Oligomer
gagcacuuuuacaaacauu

SEQ ID NO: 5602 - RNA, 19 nt, artificial
  Oligomer
ggaaugucaaagauuguuu

SEQ ID NO: 5603 - RNA, 19 nt, artificial
  Oligomer
gagugcauuucauuuucaa

SEQ ID NO: 5604 - RNA, 19 nt, artificial
  Oligomer
gggagugcauuucauuuuc

SEQ ID NO: 5605 - RNA, 19 nt, artificial
  Oligomer
gacuucuuuaguauccaua

SEQ ID NO: 5606 - RNA, 19 nt, artificial
  Oligomer
gcacccuuuuacacugaca

SEQ ID NO: 5607 - RNA, 19 nt, artificial
  Oligomer
ccuaaguucuuuuacacaa

SEQ ID NO: 5608 - RNA, 19 nt, artificial
  Oligomer
aagugggacaauacauuuu

SEQ ID NO: 5609 - RNA, 19 nt, artificial
  Oligomer
caaaauggaagugggacaa

SEQ ID NO: 5610 - RNA, 19 nt, artificial
  Oligomer
cucacccuuucaaaaccau

SEQ ID NO: 5611 - RNA, 19 nt, artificial
  Oligomer
cgguuuuggcgaucucaac

SEQ ID NO: 5612 - RNA, 19 nt, artificial
  Oligomer
ugagagguuggugcgguuu

SEQ ID NO: 5613 - RNA, 19 nt, artificial
  Oligomer
agagaguuuggcugugcau

SEQ ID NO: 5614 - RNA, 19 nt, artificial
  Oligomer
cagagaguuuggcugugca

SEQ ID NO: 5615 - RNA, 19 nt, artificial
  Oligomer
acacacaucaucucuuugu

SEQ ID NO: 5616 - RNA, 19 nt, artificial
  Oligomer
acuuugaagucuuuuggua

SEQ ID NO: 5617 - RNA, 19 nt, artificial
  Oligomer
ucacuggaguugucaucac

SEQ ID NO: 5618 - RNA, 19 nt, artificial
  Oligomer
uccucuuugucugguauua

SEQ ID NO: 5619 - RNA, 19 nt, artificial
  Oligomer
gacaggcaaaaugaaaguu

SEQ ID NO: 5620 - RNA, 19 nt, artificial
  Oligomer
ugcaauuguguuugugaaa

SEQ ID NO: 5621 - RNA, 19 nt, artificial
  Oligomer
uugcaauuguguuugugaa

SEQ ID NO: 5622 - RNA, 19 nt, artificial
  Oligomer
cuuuugcaauuguguuugu

SEQ ID NO: 5623 - RNA, 19 nt, artificial
  Oligomer
cuuaagacuaugaagguuu

SEQ ID NO: 5624 - RNA, 19 nt, artificial
  Oligomer
agcauuuauuaacagguac

SEQ ID NO: 5625 - RNA, 19 nt, artificial
  Oligomer
agcacuuaguauuuagcau

SEQ ID NO: 5626 - RNA, 19 nt, artificial
  Oligomer
ccaagguuuucuaucuuca

SEQ ID NO: 5627 - RNA, 19 nt, artificial
  Oligomer
cuccaagguuuucuaucuu

SEQ ID NO: 5628 - RNA, 19 nt, artificial
  Oligomer
agaauauuggcccuuucua

SEQ ID NO: 5629 - RNA, 19 nt, artificial
  Oligomer
accauugcacaucuauuua

SEQ ID NO: 5630 - RNA, 19 nt, artificial
  Oligomer
aguuguucuuugucauacu

SEQ ID NO: 5631 - RNA, 19 nt, artificial
  Oligomer
gaauauaauugaaggaggu

SEQ ID NO: 5632 - RNA, 19 nt, artificial
  Oligomer
gaaugggagagugagagaa

SEQ ID NO: 5633 - RNA, 19 nt, artificial
  Oligomer
cuuggagccacaaauguuu

SEQ ID NO: 5634 - RNA, 19 nt, artificial
  Oligomer
gucucuaaaucacuguuag

SEQ ID NO: 5635 - RNA, 19 nt, artificial
  Oligomer
gagagucucuaaaucacug

SEQ ID NO: 5636 - RNA, 19 nt, artificial
  Oligomer
caacccagaaacaaaaauc

SEQ ID NO: 5637 - RNA, 19 nt, artificial
  Oligomer
uguaucugauauggucauu

SEQ ID NO: 5638 - RNA, 19 nt, artificial
  Oligomer
cucaucuaguccugcuccu

SEQ ID NO: 5639 - RNA, 19 nt, artificial
  Oligomer
ugcacauucuuauuugaag

SEQ ID NO: 5640 - RNA, 19 nt, artificial
  Oligomer
cugcacauucuuauuugaa

SEQ ID NO: 5641 - RNA, 19 nt, artificial
  Oligomer
ccugaaggguucugcacau

SEQ ID NO: 5642 - RNA, 19 nt, artificial
  Oligomer
uacuaauacagcaggguaa

SEQ ID NO: 5643 - RNA, 19 nt, artificial
  Oligomer
caaggaguagcuauauauu

SEQ ID NO: 5644 - RNA, 19 nt, artificial
  Oligomer
ucagaauccucaaaaucag

SEQ ID NO: 5645 - RNA, 19 nt, artificial
  Oligomer
cccuaagauuaugaaacug

SEQ ID NO: 5646 - RNA, 19 nt, artificial
  Oligomer
caguaacuucccuaagauu

SEQ ID NO: 5647 - RNA, 19 nt, artificial
  Oligomer
aucaaaagguucaguaacu

SEQ ID NO: 5648 - RNA, 19 nt, artificial
  Oligomer
ucaaaagggaaaggaucaa

SEQ ID NO: 5649 - RNA, 19 nt, artificial
  Oligomer
aaaagauucuuggacucaa

SEQ ID NO: 5650 - RNA, 19 nt, artificial
  Oligomer
cugcuuaaaaauggacaaa

SEQ ID NO: 5651 - RNA, 19 nt, artificial
  Oligomer
ccugcuuaaaaauggacaa

SEQ ID NO: 5652 - RNA, 19 nt, artificial
  Oligomer
gaggaaauaaauguggguu

SEQ ID NO: 5653 - RNA, 19 nt, artificial
  Oligomer
caacaaggaaaacuucuaa

SEQ ID NO: 5654 - RNA, 19 nt, artificial
  Oligomer
gugcauuucauuuucaaca

SEQ ID NO: 5655 - RNA, 19 nt, artificial
  Oligomer
acaggccugaaacaaaaga

SEQ ID NO: 5656 - RNA, 19 nt, artificial
  Oligomer
uccucagcuacaacaucua

SEQ ID NO: 5657 - RNA, 19 nt, artificial
  Oligomer
agaugcaggaaaggaacaa

SEQ ID NO: 5658 - RNA, 19 nt, artificial
  Oligomer
ccagaugcaggaaaggaac

SEQ ID NO: 5659 - RNA, 19 nt, artificial
  Oligomer
ucgcauccauucucaaguc

SEQ ID NO: 5660 - RNA, 19 nt, artificial
  Oligomer
ucagcuaugagguggugau

SEQ ID NO: 5661 - RNA, 19 nt, artificial
  Oligomer
cuccauuuuugucauucug

SEQ ID NO: 5662 - RNA, 19 nt, artificial
  Oligomer
cacccuuuuacacugacau

SEQ ID NO: 5663 - RNA, 19 nt, artificial
  Oligomer
uuccaccuaaguucuuuua

SEQ ID NO: 5664 - RNA, 19 nt, artificial
  Oligomer
gucccauguuucuguaucu

SEQ ID NO: 5665 - RNA, 19 nt, artificial
  Oligomer
gggucccauguuucuguau

SEQ ID NO: 5666 - RNA, 19 nt, artificial
  Oligomer
guuuaugauauuccaccua

SEQ ID NO: 5667 - RNA, 19 nt, artificial
  Oligomer
cggguuuaugauauuccac

SEQ ID NO: 5668 - RNA, 19 nt, artificial
  Oligomer
agaguuuggcugugcauaa

SEQ ID NO: 5669 - RNA, 19 nt, artificial
  Oligomer
ugaagucuuuugguacaca

SEQ ID NO: 5670 - RNA, 19 nt, artificial
  Oligomer
gcaucacuggaguugucau

SEQ ID NO: 5671 - RNA, 19 nt, artificial
  Oligomer
agacaggcaaaaugaaagu

SEQ ID NO: 5672 - RNA, 19 nt, artificial
  Oligomer
ugaacuuggagacaggcaa

SEQ ID NO: 5673 - RNA, 19 nt, artificial
  Oligomer
ugauccuuauucaguagca

SEQ ID NO: 5674 - RNA, 19 nt, artificial
  Oligomer
ggaccugggagauaauucu

SEQ ID NO: 5675 - RNA, 19 nt, artificial
  Oligomer
ucuuaagacuaugaagguu

SEQ ID NO: 5676 - RNA, 19 nt, artificial
  Oligomer
cucuaagaaugaugaagca

SEQ ID NO: 5677 - RNA, 19 nt, artificial
  Oligomer
guacucuaagaaugaugaa

SEQ ID NO: 5678 - RNA, 19 nt, artificial
  Oligomer
cagguacucuaagaaugau

SEQ ID NO: 5679 - RNA, 19 nt, artificial
  Oligomer
aaaaccagcuucauuuguu

SEQ ID NO: 5680 - RNA, 19 nt, artificial
  Oligomer
guguuauuacuaugaguca

SEQ ID NO: 5681 - RNA, 19 nt, artificial
  Oligomer
ugcuuagagacacuuaggu

SEQ ID NO: 5682 - RNA, 19 nt, artificial
  Oligomer
ggaugguuucugcuuagag

SEQ ID NO: 5683 - RNA, 19 nt, artificial
  Oligomer
ucauacuacuauuccuuuc

SEQ ID NO: 5684 - RNA, 19 nt, artificial
  Oligomer
ugucauacuacuauuccuu

SEQ ID NO: 5685 - RNA, 19 nt, artificial
  Oligomer
gaaggagguauacacauac

SEQ ID NO: 5686 - RNA, 19 nt, artificial
  Oligomer
aaggaaauaaggagaaaag

SEQ ID NO: 5687 - RNA, 19 nt, artificial
  Oligomer
gacugguuuaggaggaaaa

SEQ ID NO: 5688 - RNA, 19 nt, artificial
  Oligomer
cgguaaugaggaagaagga

SEQ ID NO: 5689 - RNA, 19 nt, artificial
  Oligomer
cucuucaacuucgguaaug

SEQ ID NO: 5690 - RNA, 19 nt, artificial
  Oligomer
cauggaugauugcacuuca

SEQ ID NO: 5691 - RNA, 19 nt, artificial
  Oligomer
ccuuggagccacaaauguu

SEQ ID NO: 5692 - RNA, 19 nt, artificial
  Oligomer
cccuuggagccacaaaugu

SEQ ID NO: 5693 - RNA, 19 nt, artificial
  Oligomer
caaauucacacucaauagu

SEQ ID NO: 5694 - RNA, 19 nt, artificial
  Oligomer
auguaucugauauggucau

SEQ ID NO: 5695 - RNA, 19 nt, artificial
  Oligomer
cuuaggaauugugacaaau

SEQ ID NO: 5696 - RNA, 19 nt, artificial
  Oligomer
ucaucuaguccugcuccuu

SEQ ID NO: 5697 - RNA, 19 nt, artificial
  Oligomer
ggguuggagguggagaauu

SEQ ID NO: 5698 - RNA, 19 nt, artificial
  Oligomer
cauucuuauuugaagcaug

SEQ ID NO: 5699 - RNA, 19 nt, artificial
  Oligomer
guaauacucaucauuuacc

SEQ ID NO: 5700 - RNA, 19 nt, artificial
  Oligomer
aaaagaagaaggaaaccaa

SEQ ID NO: 5701 - RNA, 19 nt, artificial
  Oligomer
caaaagaagaaggaaacca

SEQ ID NO: 5702 - RNA, 19 nt, artificial
  Oligomer
gcugccucagaauccucaa

SEQ ID NO: 5703 - RNA, 19 nt, artificial
  Oligomer
cagguuugauacucuuucc

SEQ ID NO: 5704 - RNA, 19 nt, artificial
  Oligomer
ucuuacuccagguuugaua

SEQ ID NO: 5705 - RNA, 19 nt, artificial
  Oligomer
ccuaagauuaugaaacugu

SEQ ID NO: 5706 - RNA, 19 nt, artificial
  Oligomer
ucccuaagauuaugaaacu

SEQ ID NO: 5707 - RNA, 19 nt, artificial
  Oligomer
aaaagggaaaggaucaaaa

SEQ ID NO: 5708 - RNA, 19 nt, artificial
  Oligomer
agggaaaagauucuuggac

SEQ ID NO: 5709 - RNA, 19 nt, artificial
  Oligomer
ucaguggaaguuagggaaa

SEQ ID NO: 5710 - RNA, 19 nt, artificial
  Oligomer
cuaugguuuugagagcacu

SEQ ID NO: 5711 - RNA, 19 nt, artificial
  Oligomer
uggagcucuaugguuuuga

SEQ ID NO: 5712 - RNA, 19 nt, artificial
  Oligomer
guggagcucuaugguuuug

SEQ ID NO: 5713 - RNA, 19 nt, artificial
  Oligomer
cucuugccagucugucgaa

SEQ ID NO: 5714 - RNA, 19 nt, artificial
  Oligomer
aggaaauaaauguggguug

SEQ ID NO: 5715 - RNA, 19 nt, artificial
  Oligomer
ugauucucuugccagucug

SEQ ID NO: 5716 - RNA, 19 nt, artificial
  Oligomer
aaaggaacaaugccggcuu

SEQ ID NO: 5717 - RNA, 19 nt, artificial
  Oligomer
gucagucugguacaaauau

SEQ ID NO: 5718 - RNA, 19 nt, artificial
  Oligomer
caagucagucugguacaaa

SEQ ID NO: 5719 - RNA, 19 nt, artificial
  Oligomer
ggaagacuucuuuaguauc

SEQ ID NO: 5720 - RNA, 19 nt, artificial
  Oligomer
ccugaggaagacuucuuua

SEQ ID NO: 5721 - RNA, 19 nt, artificial
  Oligomer
ggcacccuuuuacacugac

SEQ ID NO: 5722 - RNA, 19 nt, artificial
  Oligomer
caccuaaguucuuuuacac

SEQ ID NO: 5723 - RNA, 19 nt, artificial
  Oligomer
agcuacagaugaagaagaa

SEQ ID NO: 5724 - RNA, 19 nt, artificial
  Oligomer
cucaacagaagguggucau

SEQ ID NO: 5725 - RNA, 19 nt, artificial
  Oligomer
ggcgaucucaacagaaggu

SEQ ID NO: 5726 - RNA, 19 nt, artificial
  Oligomer
ugauauuccaccuaaguuc

SEQ ID NO: 5727 - RNA, 19 nt, artificial
  Oligomer
cccauguuucuguaucucu

SEQ ID NO: 5728 - RNA, 19 nt, artificial
  Oligomer
ggucccauguuucuguauc

SEQ ID NO: 5729 - RNA, 19 nt, artificial
  Oligomer
guuuggcugugcauaauau

SEQ ID NO: 5730 - RNA, 19 nt, artificial
  Oligomer
ucuuugugaucuucuucau

SEQ ID NO: 5731 - RNA, 19 nt, artificial
  Oligomer
aucucuuugugaucuucuu

SEQ ID NO: 5732 - RNA, 19 nt, artificial
  Oligomer
ucaucucuuugugaucuuc

SEQ ID NO: 5733 - RNA, 19 nt, artificial
  Oligomer
gaagucuuuugguacacac

SEQ ID NO: 5734 - RNA, 19 nt, artificial
  Oligomer
aggcaaaaugaaaguuauc

SEQ ID NO: 5735 - RNA, 19 nt, artificial
  Oligomer
gggcucuccauuuuuguca

SEQ ID NO: 5736 - RNA, 19 nt, artificial
  Oligomer
gguacucuaagaaugauga

SEQ ID NO: 5737 - RNA, 19 nt, artificial
  Oligomer
caagguuuucuaucuucaa

SEQ ID NO: 5738 - RNA, 19 nt, artificial
  Oligomer
cuauuuaauguggaauggu

SEQ ID NO: 5739 - RNA, 19 nt, artificial
  Oligomer
aggcucuguuuauuguuuc

SEQ ID NO: 5740 - RNA, 19 nt, artificial
  Oligomer
acaccauugcacaucuauu

SEQ ID NO: 5741 - RNA, 19 nt, artificial
  Oligomer
aggaugguuucugcuuaga

SEQ ID NO: 5742 - RNA, 19 nt, artificial
  Oligomer
ugaggguaggucugacaaa

SEQ ID NO: 5743 - RNA, 19 nt, artificial
  Oligomer
gucauacuacuauuccuuu

SEQ ID NO: 5744 - RNA, 19 nt, artificial
  Oligomer
acucaguuguucuuuguca

SEQ ID NO: 5745 - RNA, 19 nt, artificial
  Oligomer
cuggucacaaauuuugaug

SEQ ID NO: 5746 - RNA, 19 nt, artificial
  Oligomer
ucuggucacaaauuuugau

SEQ ID NO: 5747 - RNA, 19 nt, artificial
  Oligomer
agacugguuuaggaggaaa

SEQ ID NO: 5748 - RNA, 19 nt, artificial
  Oligomer
uaaugaggaagaaggagaa

SEQ ID NO: 5749 - RNA, 19 nt, artificial
  Oligomer
guaaugaggaagaaggaga

SEQ ID NO: 5750 - RNA, 19 nt, artificial
  Oligomer
cuucgguaaugaggaagaa

SEQ ID NO: 5751 - RNA, 19 nt, artificial
  Oligomer
aacucuucaacuucgguaa

SEQ ID NO: 5752 - RNA, 19 nt, artificial
  Oligomer
acagagaucaaauucacac

SEQ ID NO: 5753 - RNA, 19 nt, artificial
  Oligomer
cugaaggguucugcacauu

SEQ ID NO: 5754 - RNA, 19 nt, artificial
  Oligomer
agggucaagaacaggcuaa

SEQ ID NO: 5755 - RNA, 19 nt, artificial
  Oligomer
ucauuuaccacugugcuug

SEQ ID NO: 5756 - RNA, 19 nt, artificial
  Oligomer
cucaucauuuaccacugug

SEQ ID NO: 5757 - RNA, 19 nt, artificial
  Oligomer
cagaagaauauuggauuga

SEQ ID NO: 5758 - RNA, 19 nt, artificial
  Oligomer
ccucagaauccucaaaauc

SEQ ID NO: 5759 - RNA, 19 nt, artificial
  Oligomer
cuaagauuaugaaacugug

SEQ ID NO: 5760 - RNA, 19 nt, artificial
  Oligomer
agauucuuggacucaauuu

SEQ ID NO: 5761 - RNA, 19 nt, artificial
  Oligomer
gucaguggaaguuagggaa

SEQ ID NO: 5762 - RNA, 19 nt, artificial
  Oligomer
cccugcuuaaaaauggaca

SEQ ID NO: 5763 - RNA, 19 nt, artificial
  Oligomer
ugaggaaauaaaugugggu

SEQ ID NO: 5764 - RNA, 19 nt, artificial
  Oligomer
ucuaacuugucucuuccau

SEQ ID NO: 5765 - RNA, 19 nt, artificial
  Oligomer
caaggaaaacuucuaacuu

SEQ ID NO: 5766 - RNA, 19 nt, artificial
  Oligomer
acaaggaaaacuucuaacu

SEQ ID NO: 5767 - RNA, 19 nt, artificial
  Oligomer
ucaacaaggaaaacuucua

SEQ ID NO: 5768 - RNA, 19 nt, artificial
  Oligomer
ugaggagaaagaugugauc

SEQ ID NO: 5769 - RNA, 19 nt, artificial
  Oligomer
ucagcuacaacaucuaccu

SEQ ID NO: 5770 - RNA, 19 nt, artificial
  Oligomer
gccuuugagugguuugcag

SEQ ID NO: 5771 - RNA, 19 nt, artificial
  Oligomer
acaugccuuugagugguuu

SEQ ID NO: 5772 - RNA, 19 nt, artificial
  Oligomer
aagucagucugguacaaau

SEQ ID NO: 5773 - RNA, 19 nt, artificial
  Oligomer
uccauucucaagucagucu

SEQ ID NO: 5774 - RNA, 19 nt, artificial
  Oligomer
acccuucgcauccauucuc

SEQ ID NO: 5775 - RNA, 19 nt, artificial
  Oligomer
cugccagugaagauguguu

SEQ ID NO: 5776 - RNA, 19 nt, artificial
  Oligomer
uggaagugggacaauacau

SEQ ID NO: 5777 - RNA, 19 nt, artificial
  Oligomer
ucaaaauggaagugggaca

SEQ ID NO: 5778 - RNA, 19 nt, artificial
  Oligomer
ggguucaaaauggaagugg

SEQ ID NO: 5779 - RNA, 19 nt, artificial
  Oligomer
gucacucacccuuucaaaa

SEQ ID NO: 5780 - RNA, 19 nt, artificial
  Oligomer
ucccauguuucuguaucuc

SEQ ID NO: 5781 - RNA, 19 nt, artificial
  Oligomer
ugggucccauguuucugua

SEQ ID NO: 5782 - RNA, 19 nt, artificial
  Oligomer
ccuaugacuuggaaaugga

SEQ ID NO: 5783 - RNA, 19 nt, artificial
  Oligomer
cucuuugugaucuucuuca

SEQ ID NO: 5784 - RNA, 19 nt, artificial
  Oligomer
gucuuuugguacacacauc

SEQ ID NO: 5785 - RNA, 19 nt, artificial
  Oligomer
cuggaguugucaucacgcu

SEQ ID NO: 5786 - RNA, 19 nt, artificial
  Oligomer
agcacucucugaacuugga

SEQ ID NO: 5787 - RNA, 19 nt, artificial
  Oligomer
uuaacagguacucuaagaa

SEQ ID NO: 5788 - RNA, 19 nt, artificial
  Oligomer
guguuauccaguuaugaga

SEQ ID NO: 5789 - RNA, 19 nt, artificial
  Oligomer
gagaauauuggcccuuucu

SEQ ID NO: 5790 - RNA, 19 nt, artificial
  Oligomer
caaaguaugaacuggagag

SEQ ID NO: 5791 - RNA, 19 nt, artificial
  Oligomer
agggacuaggaugaacuaa

SEQ ID NO: 5792 - RNA, 19 nt, artificial
  Oligomer
caagggacuaggaugaacu

SEQ ID NO: 5793 - RNA, 19 nt, artificial
  Oligomer
cuuuuaaaaucuggucaca

SEQ ID NO: 5794 - RNA, 19 nt, artificial
  Oligomer
ucuuuuaaaaucuggucac

SEQ ID NO: 5795 - RNA, 19 nt, artificial
  Oligomer
agaauauaauugaaggagg

SEQ ID NO: 5796 - RNA, 19 nt, artificial
  Oligomer
ugggagagugagagaaaau

SEQ ID NO: 5797 - RNA, 19 nt, artificial
  Oligomer
acucuucaacuucgguaau

SEQ ID NO: 5798 - RNA, 19 nt, artificial
  Oligomer
ggaacuaaaaccaguuuua

SEQ ID NO: 5799 - RNA, 19 nt, artificial
  Oligomer
cagagaucaaauucacacu

SEQ ID NO: 5800 - RNA, 19 nt, artificial
  Oligomer
ucugauauggucauuuguu

SEQ ID NO: 5801 - RNA, 19 nt, artificial
  Oligomer
aacuuaggaauugugacaa

SEQ ID NO: 5802 - RNA, 19 nt, artificial
  Oligomer
gggucaagaacaggcuaag

SEQ ID NO: 5803 - RNA, 19 nt, artificial
  Oligomer
acucaucauuuaccacugu

SEQ ID NO: 5804 - RNA, 19 nt, artificial
  Oligomer
gaauauuggauugauugga

SEQ ID NO: 5805 - RNA, 19 nt, artificial
  Oligomer
ugggccagauguucuuucu

SEQ ID NO: 5806 - RNA, 19 nt, artificial
  Oligomer
aacaagaguucgaagacaa

SEQ ID NO: 5807 - RNA, 19 nt, artificial
  Oligomer
aguauugacaucugagcau

SEQ ID NO: 5808 - RNA, 19 nt, artificial
  Oligomer
ugaaggaaauuuuccagau

SEQ ID NO: 5809 - RNA, 19 nt, artificial
  Oligomer
ugucauuuuugccaucauu

SEQ ID NO: 5810 - RNA, 19 nt, artificial
  Oligomer
gaaaggaucaaaagguuca

SEQ ID NO: 5811 - RNA, 19 nt, artificial
  Oligomer
agggaaaggaucaaaaggu

SEQ ID NO: 5812 - RNA, 19 nt, artificial
  Oligomer
gaaucaaaagggaaaggau

SEQ ID NO: 5813 - RNA, 19 nt, artificial
  Oligomer
agaaucaaaagggaaagga

SEQ ID NO: 5814 - RNA, 19 nt, artificial
  Oligomer
cuuggacucaauuuuagaa

SEQ ID NO: 5815 - RNA, 19 nt, artificial
  Oligomer
gauucuuggacucaauuuu

SEQ ID NO: 5816 - RNA, 19 nt, artificial
  Oligomer
aguuagggaaaagauucuu

SEQ ID NO: 5817 - RNA, 19 nt, artificial
  Oligomer
uggaaguuagggaaaagau

SEQ ID NO: 5818 - RNA, 19 nt, artificial
  Oligomer
guggaaguuagggaaaaga

SEQ ID NO: 5819 - RNA, 19 nt, artificial
  Oligomer
cucaguaaugucaguggaa

SEQ ID NO: 5820 - RNA, 19 nt, artificial
  Oligomer
gagagcacuuuuacaaaca

SEQ ID NO: 5821 - RNA, 19 nt, artificial
  Oligomer
ugagagcacuuuuacaaac

SEQ ID NO: 5822 - RNA, 19 nt, artificial
  Oligomer
ugguuuugagagcacuuuu

SEQ ID NO: 5823 - RNA, 19 nt, artificial
  Oligomer
augguuuugagagcacuuu

SEQ ID NO: 5824 - RNA, 19 nt, artificial
  Oligomer
ggaaaacuucuaacuuguc

SEQ ID NO: 5825 - RNA, 19 nt, artificial
  Oligomer
aggagaaagaugugaucac

SEQ ID NO: 5826 - RNA, 19 nt, artificial
  Oligomer
ccaaucugaagcucaaaaa

SEQ ID NO: 5827 - RNA, 19 nt, artificial
  Oligomer
cagucugguacaaauauug

SEQ ID NO: 5828 - RNA, 19 nt, artificial
  Oligomer
gcauccauucucaagucag

SEQ ID NO: 5829 - RNA, 19 nt, artificial
  Oligomer
ugaagauguguucagcuau

SEQ ID NO: 5830 - RNA, 19 nt, artificial
  Oligomer
cugaggaagacuucuuuag

SEQ ID NO: 5831 - RNA, 19 nt, artificial
  Oligomer
ucuccauuuuugucauucu

SEQ ID NO: 5832 - RNA, 19 nt, artificial
  Oligomer
cucuccauuuuugucauuc

SEQ ID NO: 5833 - RNA, 19 nt, artificial
  Oligomer
gcgaucucaacagaaggug

SEQ ID NO: 5834 - RNA, 19 nt, artificial
  Oligomer
uuaugauauuccaccuaag

SEQ ID NO: 5835 - RNA, 19 nt, artificial
  Oligomer
ugaucuucuucauuggccu

SEQ ID NO: 5836 - RNA, 19 nt, artificial
  Oligomer
gaguugucaucacgcugug

SEQ ID NO: 5837 - RNA, 19 nt, artificial
  Oligomer
aggcaucacuggaguuguc

SEQ ID NO: 5838 - RNA, 19 nt, artificial
  Oligomer
uccuuauucaguagcacuc

SEQ ID NO: 5839 - RNA, 19 nt, artificial
  Oligomer
uaagaaugaugaagcauug

SEQ ID NO: 5840 - RNA, 19 nt, artificial
  Oligomer
agguacucuaagaaugaug

SEQ ID NO: 5841 - RNA, 19 nt, artificial
  Oligomer
uccaagguuuucuaucuuc

SEQ ID NO: 5842 - RNA, 19 nt, artificial
  Oligomer
cacaccauugcacaucuau

SEQ ID NO: 5843 - RNA, 19 nt, artificial
  Oligomer
ccuuucgucucccagaauc

SEQ ID NO: 5844 - RNA, 19 nt, artificial
  Oligomer
ucaagggacuaggaugaac

SEQ ID NO: 5845 - RNA, 19 nt, artificial
  Oligomer
augggagagugagagaaaa

SEQ ID NO: 5846 - RNA, 19 nt, artificial
  Oligomer
aggaaaaggaaauaaggag

SEQ ID NO: 5847 - RNA, 19 nt, artificial
  Oligomer
aggaggaaaaggaaauaag

SEQ ID NO: 5848 - RNA, 19 nt, artificial
  Oligomer
cuguuaguguggccaagag

SEQ ID NO: 5849 - RNA, 19 nt, artificial
  Oligomer
uccagcuagcccuuaugaa

SEQ ID NO: 5850 - RNA, 19 nt, artificial
  Oligomer
ucugcacauucuuauuuga

SEQ ID NO: 5851 - RNA, 19 nt, artificial
  Oligomer
gaacaggcuaaggauacua

SEQ ID NO: 5852 - RNA, 19 nt, artificial
  Oligomer
aggaaauuuuccagaucau

SEQ ID NO: 5853 - RNA, 19 nt, artificial
  Oligomer
gaaggaaauuuuccagauc

SEQ ID NO: 5854 - RNA, 19 nt, artificial
  Oligomer
agaagaaggaaaccaagga

SEQ ID NO: 5855 - RNA, 19 nt, artificial
  Oligomer
acuucccuaagauuaugaa

SEQ ID NO: 5856 - RNA, 19 nt, artificial
  Oligomer
ggaaaggaucaaaagguuc

SEQ ID NO: 5857 - RNA, 19 nt, artificial
  Oligomer
guaaugucaguggaaguua

SEQ ID NO: 5858 - RNA, 19 nt, artificial
  Oligomer
ucaguaaugucaguggaag

SEQ ID NO: 5859 - RNA, 19 nt, artificial
  Oligomer
caaagauuguuugauagug

SEQ ID NO: 5860 - RNA, 19 nt, artificial
  Oligomer
aggaaugucaaagauuguu

SEQ ID NO: 5861 - RNA, 19 nt, artificial
  Oligomer
gaaauaaauguggguugug

SEQ ID NO: 5862 - RNA, 19 nt, artificial
  Oligomer
gaaaacuucuaacuugucu

SEQ ID NO: 5863 - RNA, 19 nt, artificial
  Oligomer
cugaaacaaaagacuuugu

SEQ ID NO: 5864 - RNA, 19 nt, artificial
  Oligomer
ccugaaacaaaagacuuug

SEQ ID NO: 5865 - RNA, 19 nt, artificial
  Oligomer
gcuacaacaucuaccucac

SEQ ID NO: 5866 - RNA, 19 nt, artificial
  Oligomer
gaugcaggaaaggaacaau

SEQ ID NO: 5867 - RNA, 19 nt, artificial
  Oligomer
ccuucgcauccauucucaa

SEQ ID NO: 5868 - RNA, 19 nt, artificial
  Oligomer
ugauaagcaggaguuucaa

SEQ ID NO: 5869 - RNA, 19 nt, artificial
  Oligomer
guauccauauccgcaucgu

SEQ ID NO: 5870 - RNA, 19 nt, artificial
  Oligomer
ugaggaagacuucuuuagu

SEQ ID NO: 5871 - RNA, 19 nt, artificial
  Oligomer
cccugaggaagacuucuuu

SEQ ID NO: 5872 - RNA, 19 nt, artificial
  Oligomer
uggcacccuuuuacacuga

SEQ ID NO: 5873 - RNA, 19 nt, artificial
  Oligomer
ugacuuggaaauggauagu

SEQ ID NO: 5874 - RNA, 19 nt, artificial
  Oligomer
cuaugacuuggaaauggau

SEQ ID NO: 5875 - RNA, 19 nt, artificial
  Oligomer
uggagacaggcaaaaugaa

SEQ ID NO: 5876 - RNA, 19 nt, artificial
  Oligomer
cuuccucuuugucugguau

SEQ ID NO: 5877 - RNA, 19 nt, artificial
  Oligomer
ucuuccucuuugucuggua

SEQ ID NO: 5878 - RNA, 19 nt, artificial
  Oligomer
guagcacucucugaacuug

SEQ ID NO: 5879 - RNA, 19 nt, artificial
  Oligomer
acgucuuccucuuugucug

SEQ ID NO: 5880 - RNA, 19 nt, artificial
  Oligomer
gaccugggagauaauucua

SEQ ID NO: 5881 - RNA, 19 nt, artificial
  Oligomer
gaaauuugaauacuugcag

SEQ ID NO: 5882 - RNA, 19 nt, artificial
  Oligomer
ggaauggugugugaaugcc

SEQ ID NO: 5883 - RNA, 19 nt, artificial
  Oligomer
guggaauggugugugaaug

SEQ ID NO: 5884 - RNA, 19 nt, artificial
  Oligomer
guuucuccaagguuuucua

SEQ ID NO: 5885 - RNA, 19 nt, artificial
  Oligomer
gugcgaauauagccuuucu

SEQ ID NO: 5886 - RNA, 19 nt, artificial
  Oligomer
uaggaggaaaaggaaauaa

SEQ ID NO: 5887 - RNA, 19 nt, artificial
  Oligomer
uuaggaggaaaaggaaaua

SEQ ID NO: 5888 - RNA, 19 nt, artificial
  Oligomer
gguuuaggaggaaaaggaa

SEQ ID NO: 5889 - RNA, 19 nt, artificial
  Oligomer
ugguuuaggaggaaaagga

SEQ ID NO: 5890 - RNA, 19 nt, artificial
  Oligomer
ccuuauuuuccguaaauac

SEQ ID NO: 5891 - RNA, 19 nt, artificial
  Oligomer
gguucugcacauucuuauu

SEQ ID NO: 5892 - RNA, 19 nt, artificial
  Oligomer
gguaacugggccagauguu

SEQ ID NO: 5893 - RNA, 19 nt, artificial
  Oligomer
gcauacuccaguuuacuaa

SEQ ID NO: 5894 - RNA, 19 nt, artificial
  Oligomer
gucauuuuugccaucauua

SEQ ID NO: 5895 - RNA, 19 nt, artificial
  Oligomer
gaagaaggaaaccaaggag

SEQ ID NO: 5896 - RNA, 19 nt, artificial
  Oligomer
aggaaaacuucuaacuugu

SEQ ID NO: 5897 - RNA, 19 nt, artificial
  Oligomer
acaaaagacuuuguaugga

SEQ ID NO: 5898 - RNA, 19 nt, artificial
  Oligomer
agcuacaacaucuaccuca

SEQ ID NO: 5899 - RNA, 19 nt, artificial
  Oligomer
ggugauguuagugggagca

SEQ ID NO: 5900 - RNA, 19 nt, artificial
  Oligomer
cuaugagguggugauguua

SEQ ID NO: 5901 - RNA, 19 nt, artificial
  Oligomer
ugccagugaagauguguuc

SEQ ID NO: 5902 - RNA, 19 nt, artificial
  Oligomer
uuaguauccauauccgcau

SEQ ID NO: 5903 - RNA, 19 nt, artificial
  Oligomer
cuucuuuaguauccauauc

SEQ ID NO: 5904 - RNA, 19 nt, artificial
  Oligomer
cccuuuuacacugacaucc

SEQ ID NO: 5905 - RNA, 19 nt, artificial
  Oligomer
guggcacccuuuuacacug

SEQ ID NO: 5906 - RNA, 19 nt, artificial
  Oligomer
gacuuggaaauggauagug

SEQ ID NO: 5907 - RNA, 19 nt, artificial
  Oligomer
guauuaccggguuuaugau

SEQ ID NO: 5908 - RNA, 19 nt, artificial
  Oligomer
ggcaucacuggaguuguca

SEQ ID NO: 5909 - RNA, 19 nt, artificial
  Oligomer
ccucuuugucugguauuac

SEQ ID NO: 5910 - RNA, 19 nt, artificial
  Oligomer
gucuuccucuuugucuggu

SEQ ID NO: 5911 - RNA, 19 nt, artificial
  Oligomer
accugggagauaauucuac

SEQ ID NO: 5912 - RNA, 19 nt, artificial
  Oligomer
gggaccugggagauaauuc

SEQ ID NO: 5913 - RNA, 19 nt, artificial
  Oligomer
uugaauacuugcaggcuuu

SEQ ID NO: 5914 - RNA, 19 nt, artificial
  Oligomer
acagguacucuaagaauga

SEQ ID NO: 5915 - RNA, 19 nt, artificial
  Oligomer
uccuuuuuaucucucaagc

SEQ ID NO: 5916 - RNA, 19 nt, artificial
  Oligomer
uuccuuuuuaucucucaag

SEQ ID NO: 5917 - RNA, 19 nt, artificial
  Oligomer
guuuccuuuuuaucucuca

SEQ ID NO: 5918 - RNA, 19 nt, artificial
  Oligomer
cugugcgaauauagccuuu

SEQ ID NO: 5919 - RNA, 19 nt, artificial
  Oligomer
ggaggaaaaggaaauaagg

SEQ ID NO: 5920 - RNA, 19 nt, artificial
  Oligomer
gggaacuaaaaccaguuuu

SEQ ID NO: 5921 - RNA, 19 nt, artificial
  Oligomer
aggguuggagguggagaau

SEQ ID NO: 5922 - RNA, 19 nt, artificial
  Oligomer
aggguucugcacauucuua

SEQ ID NO: 5923 - RNA, 19 nt, artificial
  Oligomer
ggauugccugaaggguucu

SEQ ID NO: 5924 - RNA, 19 nt, artificial
  Oligomer
ucaagaacaggcuaaggau

SEQ ID NO: 5925 - RNA, 19 nt, artificial
  Oligomer
gucaagaacaggcuaagga

SEQ ID NO: 5926 - RNA, 19 nt, artificial
  Oligomer
cuagggucaagaacaggcu

SEQ ID NO: 5927 - RNA, 19 nt, artificial
  Oligomer
cugggccagauguucuuuc

SEQ ID NO: 5928 - RNA, 19 nt, artificial
  Oligomer
cuccaguuuacuaauacag

SEQ ID NO: 5929 - RNA, 19 nt, artificial
  Oligomer
ggacauaauacauguugag

SEQ ID NO: 5930 - RNA, 19 nt, artificial
  Oligomer
ggaaauuuuccagaucauu

SEQ ID NO: 5931 - RNA, 19 nt, artificial
  Oligomer
cuacuuugugucauuuuug

SEQ ID NO: 5932 - RNA, 19 nt, artificial
  Oligomer
aguaaugucaguggaaguu

SEQ ID NO: 5933 - RNA, 19 nt, artificial
  Oligomer
cuuaaaggaaugucaaaga

SEQ ID NO: 5934 - RNA, 19 nt, artificial
  Oligomer
ccugaagccuuggcugaaa

SEQ ID NO: 5935 - RNA, 19 nt, artificial
  Oligomer
ugcaagucaacacccuaau

SEQ ID NO: 5936 - RNA, 19 nt, artificial
  Oligomer
caaaagacuuuguauggac

SEQ ID NO: 5937 - RNA, 19 nt, artificial
  Oligomer
cuacaacaucuaccucacu

SEQ ID NO: 5938 - RNA, 19 nt, artificial
  Oligomer
gggaaaaauaaaggaaugc

SEQ ID NO: 5939 - RNA, 19 nt, artificial
  Oligomer
uggagcugaacgaauugua

SEQ ID NO: 5940 - RNA, 19 nt, artificial
  Oligomer
ucuccaagguuuucuaucu

SEQ ID NO: 5941 - RNA, 19 nt, artificial
  Oligomer
gcugugcgaauauagccuu

SEQ ID NO: 5942 - RNA, 19 nt, artificial
  Oligomer
gaagacugguuuaggagga

SEQ ID NO: 5943 - RNA, 19 nt, artificial
  Oligomer
uucuccagcuagcccuuau

SEQ ID NO: 5944 - RNA, 19 nt, artificial
  Oligomer
ccugcuccuugugcuauaa

SEQ ID NO: 5945 - RNA, 19 nt, artificial
  Oligomer
ccaauaggauugccugaag

SEQ ID NO: 5946 - RNA, 19 nt, artificial
  Oligomer
agaacaggcuaaggauacu

SEQ ID NO: 5947 - RNA, 19 nt, artificial
  Oligomer
acuccaguuuacuaauaca

SEQ ID NO: 5948 - RNA, 19 nt, artificial
  Oligomer
cagaucauuaggacauaau

SEQ ID NO: 5949 - RNA, 19 nt, artificial
  Oligomer
aaggaaauuuuccagauca

SEQ ID NO: 5950 - RNA, 19 nt, artificial
  Oligomer
gaaugucaaagauuguuug

SEQ ID NO: 5951 - RNA, 19 nt, artificial
  Oligomer
acuucuaacuugucucuuc

SEQ ID NO: 5952 - RNA, 19 nt, artificial
  Oligomer
aaggaaaacuucuaacuug

SEQ ID NO: 5953 - RNA, 19 nt, artificial
  Oligomer
ccaaucacuuugcugugca

SEQ ID NO: 5954 - RNA, 19 nt, artificial
  Oligomer
guggugauguuagugggag

SEQ ID NO: 5955 - RNA, 19 nt, artificial
  Oligomer
gugggucccauguuucugu

SEQ ID NO: 5956 - RNA, 19 nt, artificial
  Oligomer
ugucugguauuaccggguu

SEQ ID NO: 5957 - RNA, 19 nt, artificial
  Oligomer
cccuguguuauccaguuau

SEQ ID NO: 5958 - RNA, 19 nt, artificial
  Oligomer
gcccuguguuauccaguua

SEQ ID NO: 5959 - RNA, 19 nt, artificial
  Oligomer
aagacugguuuaggaggaa

SEQ ID NO: 5960 - RNA, 19 nt, artificial
  Oligomer
ggaagaaggagaaagagcu

SEQ ID NO: 5961 - RNA, 19 nt, artificial
  Oligomer
aucaucaucaucauccuaa

SEQ ID NO: 5962 - RNA, 19 nt, artificial
  Oligomer
aacaggcuaaggauacuaa

SEQ ID NO: 5963 - RNA, 19 nt, artificial
  Oligomer
ccaguuuacuaauacagca

SEQ ID NO: 5964 - RNA, 19 nt, artificial
  Oligomer
uccagaucauuaggacaua

SEQ ID NO: 5965 - RNA, 19 nt, artificial
  Oligomer
ugugucauuuuugccauca

SEQ ID NO: 5966 - RNA, 19 nt, artificial
  Oligomer
ucauuuuuuuccucucagu

SEQ ID NO: 5967 - RNA, 19 nt, artificial
  Oligomer
cccugaguaaacaaagcau

SEQ ID NO: 5968 - RNA, 19 nt, artificial
  Oligomer
gggacacacaugccuuuga

SEQ ID NO: 5969 - RNA, 19 nt, artificial
  Oligomer
ucaagucagucugguacaa

SEQ ID NO: 5970 - RNA, 19 nt, artificial
  Oligomer
cguggaaacuaccuaagau

SEQ ID NO: 5971 - RNA, 19 nt, artificial
  Oligomer
caaugcuuguggcugugau

SEQ ID NO: 5972 - RNA, 19 nt, artificial
  Oligomer
ccaucgagcuacagaugaa

SEQ ID NO: 5973 - RNA, 19 nt, artificial
  Oligomer
ggagcugaacgaauuguac

SEQ ID NO: 5974 - RNA, 19 nt, artificial
  Oligomer
uucuucugcuuuugcaauu

SEQ ID NO: 5975 - RNA, 19 nt, artificial
  Oligomer
ucgcaucugugugacuaau

SEQ ID NO: 5976 - RNA, 19 nt, artificial
  Oligomer
uccugcccaaaguggucuu

SEQ ID NO: 5977 - RNA, 19 nt, artificial
  Oligomer
agacuaauuuccugcccaa

SEQ ID NO: 5978 - RNA, 19 nt, artificial
  Oligomer
cugcuccuugugcuauaaa

SEQ ID NO: 5979 - RNA, 19 nt, artificial
  Oligomer
uccugcuccuugugcuaua

SEQ ID NO: 5980 - RNA, 19 nt, artificial
  Oligomer
acacccuaauaccagaaua

SEQ ID NO: 5981 - RNA, 19 nt, artificial
  Oligomer
guaccucaguuauaaggag

SEQ ID NO: 5982 - RNA, 19 nt, artificial
  Oligomer
ggagaggguaccucaguua

SEQ ID NO: 5983 - RNA, 19 nt, artificial
  Oligomer
ugaacgucuuccucuuugu

SEQ ID NO: 5984 - RNA, 19 nt, artificial
  Oligomer
gagguauacacauacugau

SEQ ID NO: 5985 - RNA, 19 nt, artificial
  Oligomer
caagagagagucucuaaau

SEQ ID NO: 5986 - RNA, 19 nt, artificial
  Oligomer
ucaagagagagucucuaaa

SEQ ID NO: 5987 - RNA, 19 nt, artificial
  Oligomer
cugagcauacuccaguuua

SEQ ID NO: 5988 - RNA, 19 nt, artificial
  Oligomer
ggcugaaacccugaguaaa

SEQ ID NO: 5989 - RNA, 19 nt, artificial
  Oligomer
uuggcugaaacccugagua

SEQ ID NO: 5990 - RNA, 19 nt, artificial
  Oligomer
ggcccaacugggauaauga

SEQ ID NO: 5991 - RNA, 19 nt, artificial
  Oligomer
ucacacccuucgcauccau

SEQ ID NO: 5992 - RNA, 19 nt, artificial
  Oligomer
guggaaacuaccuaagaua

SEQ ID NO: 5993 - RNA, 19 nt, artificial
  Oligomer
ggacaauacauuuuuguca

SEQ ID NO: 5994 - RNA, 19 nt, artificial
  Oligomer
aucaucucuuugugaucuu

SEQ ID NO: 5995 - RNA, 19 nt, artificial
  Oligomer
cugagaauauuggcccuuu

SEQ ID NO: 5996 - RNA, 19 nt, artificial
  Oligomer
cgcaucugugugacuaaug

SEQ ID NO: 5997 - RNA, 19 nt, artificial
  Oligomer
cgaagacaacuggacagga

SEQ ID NO: 5998 - RNA, 19 nt, artificial
  Oligomer
aggacauaauacauguuga

SEQ ID NO: 5999 - RNA, 19 nt, artificial
  Oligomer
ugauacucuuuccacaaua

SEQ ID NO: 6000 - RNA, 19 nt, artificial
  Oligomer
cugaagccuuggcugaaac

SEQ ID NO: 6001 - RNA, 19 nt, artificial
  Oligomer
gcccaacugggauaaugaa

SEQ ID NO: 6002 - RNA, 19 nt, artificial
  Oligomer
ccugccugaauuucaacug

SEQ ID NO: 6003 - RNA, 19 nt, artificial
  Oligomer
cugguacaaauauugcaau

SEQ ID NO: 6004 - RNA, 19 nt, artificial
  Oligomer
gcguggaaacuaccuaaga

SEQ ID NO: 6005 - RNA, 19 nt, artificial
  Oligomer
agaagguggucaucaccaa

SEQ ID NO: 6006 - RNA, 19 nt, artificial
  Oligomer
cgaauuguacgugggcaga

SEQ ID NO: 6007 - RNA, 19 nt, artificial
  Oligomer
acgaauuguacgugggcag

SEQ ID NO: 6008 - RNA, 19 nt, artificial
  Oligomer
agcugaacgaauuguacgu

SEQ ID NO: 6009 - RNA, 19 nt, artificial
  Oligomer
cgagucaauaauucugauc

SEQ ID NO: 6010 - RNA, 19 nt, artificial
  Oligomer
cuucugcuuuugcaauugu

SEQ ID NO: 6011 - RNA, 19 nt, artificial
  Oligomer
cuaugagucaggcucuguu

SEQ ID NO: 6012 - RNA, 19 nt, artificial
  Oligomer
ugcgaauauagccuuucug

SEQ ID NO: 6013 - RNA, 19 nt, artificial
  Oligomer
ggagguauacacauacuga

SEQ ID NO: 6014 - RNA, 19 nt, artificial
  Oligomer
ccauuucugggaacuaaaa

SEQ ID NO: 6015 - RNA, 19 nt, artificial
  Oligomer
ugcccaaaguggucuucuc

SEQ ID NO: 6016 - RNA, 19 nt, artificial
  Oligomer
ugcuccuugugcuauaaaa

SEQ ID NO: 6017 - RNA, 19 nt, artificial
  Oligomer
ccaugacucuggcucaucu

SEQ ID NO: 6018 - RNA, 19 nt, artificial
  Oligomer
accaauaggauugccugaa

SEQ ID NO: 6019 - RNA, 19 nt, artificial
  Oligomer
gccagauguucuuucuaca

SEQ ID NO: 6020 - RNA, 19 nt, artificial
  Oligomer
aucugagcauacuccaguu

SEQ ID NO: 6021 - RNA, 19 nt, artificial
  Oligomer
gaaaucugcuguccuuccu

SEQ ID NO: 6022 - RNA, 19 nt, artificial
  Oligomer
uguaaugguuuucccuuaa

SEQ ID NO: 6023 - RNA, 19 nt, artificial
  Oligomer
uggcugaaacccugaguaa

SEQ ID NO: 6024 - RNA, 19 nt, artificial
  Oligomer
caagucaacacccuaauac

SEQ ID NO: 6025 - RNA, 19 nt, artificial
  Oligomer
cccaacugggauaaugaau

SEQ ID NO: 6026 - RNA, 19 nt, artificial
  Oligomer
acggcccaacugggauaau

SEQ ID NO: 6027 - RNA, 19 nt, artificial
  Oligomer
caaucacuuugcugugcac

SEQ ID NO: 6028 - RNA, 19 nt, artificial
  Oligomer
cugcagccugccugaauuu

SEQ ID NO: 6029 - RNA, 19 nt, artificial
  Oligomer
ugcguggaaacuaccuaag

SEQ ID NO: 6030 - RNA, 19 nt, artificial
  Oligomer
ucaaaaccaucgagcuaca

SEQ ID NO: 6031 - RNA, 19 nt, artificial
  Oligomer
ucaguuugcuggaaacccu

SEQ ID NO: 6032 - RNA, 19 nt, artificial
  Oligomer
uugcucgaaagagaauaaa

SEQ ID NO: 6033 - RNA, 19 nt, artificial
  Oligomer
ugcccuguguuauccaguu

SEQ ID NO: 6034 - RNA, 19 nt, artificial
  Oligomer
ugcauaauuaaaaccagcu

SEQ ID NO: 6035 - RNA, 19 nt, artificial
  Oligomer
ggcccuuucuaaccuaugu

SEQ ID NO: 6036 - RNA, 19 nt, artificial
  Oligomer
caauucuuuacaccaaagu

SEQ ID NO: 6037 - RNA, 19 nt, artificial
  Oligomer
ucacaaauuuugaugcuga

SEQ ID NO: 6038 - RNA, 19 nt, artificial
  Oligomer
ucauauuggucauucccug

SEQ ID NO: 6039 - RNA, 19 nt, artificial
  Oligomer
cccauuucugggaacuaaa

SEQ ID NO: 6040 - RNA, 19 nt, artificial
  Oligomer
ucuuagaacugcucccauu

SEQ ID NO: 6041 - RNA, 19 nt, artificial
  Oligomer
ccagaaacaaaaaucucua

SEQ ID NO: 6042 - RNA, 19 nt, artificial
  Oligomer
gugacaaauauguaucuga

SEQ ID NO: 6043 - RNA, 19 nt, artificial
  Oligomer
ucaccuuucauaaaauggu

SEQ ID NO: 6044 - RNA, 19 nt, artificial
  Oligomer
aggaaucucaccuuucaua

SEQ ID NO: 6045 - RNA, 19 nt, artificial
  Oligomer
ggauacuaaccaauaggau

SEQ ID NO: 6046 - RNA, 19 nt, artificial
  Oligomer
ggauacucaaguaaguuuu

SEQ ID NO: 6047 - RNA, 19 nt, artificial
  Oligomer
ugagcauacuccaguuuac

SEQ ID NO: 6048 - RNA, 19 nt, artificial
  Oligomer
gagagugucucaacacuua

SEQ ID NO: 6049 - RNA, 19 nt, artificial
  Oligomer
uuccagaucauuaggacau

SEQ ID NO: 6050 - RNA, 19 nt, artificial
  Oligomer
ucaguaacuucccuaagau

SEQ ID NO: 6051 - RNA, 19 nt, artificial
  Oligomer
uucauuuuuuuccucucag

SEQ ID NO: 6052 - RNA, 19 nt, artificial
  Oligomer
gcaucuccaacucugaguc

SEQ ID NO: 6053 - RNA, 19 nt, artificial
  Oligomer
auaccagaauaggaguuuu

SEQ ID NO: 6054 - RNA, 19 nt, artificial
  Oligomer
uaauaccagaauaggaguu

SEQ ID NO: 6055 - RNA, 19 nt, artificial
  Oligomer
ugcaccaugaugaggagaa

SEQ ID NO: 6056 - RNA, 19 nt, artificial
  Oligomer
aggccaaucacuuugcugu

SEQ ID NO: 6057 - RNA, 19 nt, artificial
  Oligomer
accuaagauagcgguugau

SEQ ID NO: 6058 - RNA, 19 nt, artificial
  Oligomer
cuaccuaagauagcgguug

SEQ ID NO: 6059 - RNA, 19 nt, artificial
  Oligomer
gugauaagcaggaguuuca

SEQ ID NO: 6060 - RNA, 19 nt, artificial
  Oligomer
cugugauaagcaggaguuu

SEQ ID NO: 6061 - RNA, 19 nt, artificial
  Oligomer
cuggaguggcacccuuuua

SEQ ID NO: 6062 - RNA, 19 nt, artificial
  Oligomer
ucccucaguuugcuggaaa

SEQ ID NO: 6063 - RNA, 19 nt, artificial
  Oligomer
accaaaaccauccggaggu

SEQ ID NO: 6064 - RNA, 19 nt, artificial
  Oligomer
gcaaaaugaaaguuaucuc

SEQ ID NO: 6065 - RNA, 19 nt, artificial
  Oligomer
ucaguuauaaggagucuga

SEQ ID NO: 6066 - RNA, 19 nt, artificial
  Oligomer
ccucaguuauaaggagucu

SEQ ID NO: 6067 - RNA, 19 nt, artificial
  Oligomer
cuuuacaccaaaguaugaa

SEQ ID NO: 6068 - RNA, 19 nt, artificial
  Oligomer
cuaaauaagaacucaguug

SEQ ID NO: 6069 - RNA, 19 nt, artificial
  Oligomer
acacauacugauguuguuu

SEQ ID NO: 6070 - RNA, 19 nt, artificial
  Oligomer
guauacacauacugauguu

SEQ ID NO: 6071 - RNA, 19 nt, artificial
  Oligomer
ucccauuucugggaacuaa

SEQ ID NO: 6072 - RNA, 19 nt, artificial
  Oligomer
gcagacuaauuuccugccc

SEQ ID NO: 6073 - RNA, 19 nt, artificial
  Oligomer
ugccaugacucuggcucau

SEQ ID NO: 6074 - RNA, 19 nt, artificial
  Oligomer
gaauuaaccuccugccaug

SEQ ID NO: 6075 - RNA, 19 nt, artificial
  Oligomer
uggacaggaaucucaccuu

SEQ ID NO: 6076 - RNA, 19 nt, artificial
  Oligomer
cugucauagaccaaaggaa

SEQ ID NO: 6077 - RNA, 19 nt, artificial
  Oligomer
cggauacucaaguaaguuu

SEQ ID NO: 6078 - RNA, 19 nt, artificial
  Oligomer
ggaguuaauguaauacuca

SEQ ID NO: 6079 - RNA, 19 nt, artificial
  Oligomer
agcauacuccaguuuacua

SEQ ID NO: 6080 - RNA, 19 nt, artificial
  Oligomer
cugaaggaaauuuuccaga

SEQ ID NO: 6081 - RNA, 19 nt, artificial
  Oligomer
cccaaaagaagaaggaaac

SEQ ID NO: 6082 - RNA, 19 nt, artificial
  Oligomer
auacugagcugccucagaa

SEQ ID NO: 6083 - RNA, 19 nt, artificial
  Oligomer
gcccaucuuacuccagguu

SEQ ID NO: 6084 - RNA, 19 nt, artificial
  Oligomer
ggacucaauuuuagaauca

SEQ ID NO: 6085 - RNA, 19 nt, artificial
  Oligomer
auguaaugguuuucccuua

SEQ ID NO: 6086 - RNA, 19 nt, artificial
  Oligomer
cacccuaauaccagaauag

SEQ ID NO: 6087 - RNA, 19 nt, artificial
  Oligomer
aacacccuaauaccagaau

SEQ ID NO: 6088 - RNA, 19 nt, artificial
  Oligomer
ucacuuugcugugcaccau

SEQ ID NO: 6089 - RNA, 19 nt, artificial
  Oligomer
agagccagaugcaggaaag

SEQ ID NO: 6090 - RNA, 19 nt, artificial
  Oligomer
gagagccagaugcaggaaa

SEQ ID NO: 6091 - RNA, 19 nt, artificial
  Oligomer
uugcuggaaacccuccuau

SEQ ID NO: 6092 - RNA, 19 nt, artificial
  Oligomer
cccucaguuugcuggaaac

SEQ ID NO: 6093 - RNA, 19 nt, artificial
  Oligomer
aaauaaaggaaugcccaau

SEQ ID NO: 6094 - RNA, 19 nt, artificial
  Oligomer
gucugguauuaccggguuu

SEQ ID NO: 6095 - RNA, 19 nt, artificial
  Oligomer
accauccggaggucuuacu

SEQ ID NO: 6096 - RNA, 19 nt, artificial
  Oligomer
ugcuuuugcaauuguguuu

SEQ ID NO: 6097 - RNA, 19 nt, artificial
  Oligomer
ccgagaguguuucuccaag

SEQ ID NO: 6098 - RNA, 19 nt, artificial
  Oligomer
uuggcccuuucuaaccuau

SEQ ID NO: 6099 - RNA, 19 nt, artificial
  Oligomer
ucugagaauauuggcccuu

SEQ ID NO: 6100 - RNA, 19 nt, artificial
  Oligomer
accucaguuauaaggaguc

SEQ ID NO: 6101 - RNA, 19 nt, artificial
  Oligomer
gcacaucuauuuaaugugg

SEQ ID NO: 6102 - RNA, 19 nt, artificial
  Oligomer
cugacaaauaaggccugcu

SEQ ID NO: 6103 - RNA, 19 nt, artificial
  Oligomer
gaacuaaauaagaacucag

SEQ ID NO: 6104 - RNA, 19 nt, artificial
  Oligomer
cacauacugauguuguuuu

SEQ ID NO: 6105 - RNA, 19 nt, artificial
  Oligomer
aggagguauacacauacug

SEQ ID NO: 6106 - RNA, 19 nt, artificial
  Oligomer
gccaagagcaggguuuucu

SEQ ID NO: 6107 - RNA, 19 nt, artificial
  Oligomer
caccuuucauaaaauggug

SEQ ID NO: 6108 - RNA, 19 nt, artificial
  Oligomer
ucucaccuuucauaaaaug

SEQ ID NO: 6109 - RNA, 19 nt, artificial
  Oligomer
cagacuaauuuccugccca

SEQ ID NO: 6110 - RNA, 19 nt, artificial
  Oligomer
guggagaauuaaccuccug

SEQ ID NO: 6111 - RNA, 19 nt, artificial
  Oligomer
gcuaaggauacuaaccaau

SEQ ID NO: 6112 - RNA, 19 nt, artificial
  Oligomer
uggaguuaauguaauacuc

SEQ ID NO: 6113 - RNA, 19 nt, artificial
  Oligomer
caguuuacuaauacagcag

SEQ ID NO: 6114 - RNA, 19 nt, artificial
  Oligomer
ucugagcauacuccaguuu

SEQ ID NO: 6115 - RNA, 19 nt, artificial
  Oligomer
acccugaguaaacaaagca

SEQ ID NO: 6116 - RNA, 19 nt, artificial
  Oligomer
gccugaaacaaaagacuuu

SEQ ID NO: 6117 - RNA, 19 nt, artificial
  Oligomer
gccugccugaauuucaacu

SEQ ID NO: 6118 - RNA, 19 nt, artificial
  Oligomer
accaaucugaagcucaaaa

SEQ ID NO: 6119 - RNA, 19 nt, artificial
  Oligomer
gggcuguucaaugcuugug

SEQ ID NO: 6120 - RNA, 19 nt, artificial
  Oligomer
cccuuucaaaaccaucgag

SEQ ID NO: 6121 - RNA, 19 nt, artificial
  Oligomer
ggauagugggucccauguu

SEQ ID NO: 6122 - RNA, 19 nt, artificial
  Oligomer
gcugugcauaauauaacag

SEQ ID NO: 6123 - RNA, 19 nt, artificial
  Oligomer
ucacgcugugccucauauu

SEQ ID NO: 6124 - RNA, 19 nt, artificial
  Oligomer
gaggguaccucaguuauaa

SEQ ID NO: 6125 - RNA, 19 nt, artificial
  Oligomer
acacuuagguccagccugu

SEQ ID NO: 6126 - RNA, 19 nt, artificial
  Oligomer
ugacaaauaaggccugcug

SEQ ID NO: 6127 - RNA, 19 nt, artificial
  Oligomer
gucugacaaauaaggccug

SEQ ID NO: 6128 - RNA, 19 nt, artificial
  Oligomer
gucacaaauuuugaugcug

SEQ ID NO: 6129 - RNA, 19 nt, artificial
  Oligomer
ggaugauugcacuucacuc

SEQ ID NO: 6130 - RNA, 19 nt, artificial
  Oligomer
gcauggaugauugcacuuc

SEQ ID NO: 6131 - RNA, 19 nt, artificial
  Oligomer
ugggaacuaaaaccaguuu

SEQ ID NO: 6132 - RNA, 19 nt, artificial
  Oligomer
uggccaagagcaggguuuu

SEQ ID NO: 6133 - RNA, 19 nt, artificial
  Oligomer
agaucaaauucacacucaa

SEQ ID NO: 6134 - RNA, 19 nt, artificial
  Oligomer
gcaucugugugacuaaugg

SEQ ID NO: 6135 - RNA, 19 nt, artificial
  Oligomer
cguaaauacacacacaaaa

SEQ ID NO: 6136 - RNA, 19 nt, artificial
  Oligomer
ccguaaauacacacacaaa

SEQ ID NO: 6137 - RNA, 19 nt, artificial
  Oligomer
ccaaaguggucuucuccag

SEQ ID NO: 6138 - RNA, 19 nt, artificial
  Oligomer
caggaaucucaccuuucau

SEQ ID NO: 6139 - RNA, 19 nt, artificial
  Oligomer
aggauugccugaaggguuc

SEQ ID NO: 6140 - RNA, 19 nt, artificial
  Oligomer
ggcuaaggauacuaaccaa

SEQ ID NO: 6141 - RNA, 19 nt, artificial
  Oligomer
cuauuacugucauagacca

SEQ ID NO: 6142 - RNA, 19 nt, artificial
  Oligomer
uguucuuucuacagaagaa

SEQ ID NO: 6143 - RNA, 19 nt, artificial
  Oligomer
agauguucuuucuacagaa

SEQ ID NO: 6144 - RNA, 19 nt, artificial
  Oligomer
agagugucucaacacuuau

SEQ ID NO: 6145 - RNA, 19 nt, artificial
  Oligomer
ugcucaacaagaguucgaa

SEQ ID NO: 6146 - RNA, 19 nt, artificial
  Oligomer
gguucaguaacuucccuaa

SEQ ID NO: 6147 - RNA, 19 nt, artificial
  Oligomer
cugccaaaugcucaaauaa

SEQ ID NO: 6148 - RNA, 19 nt, artificial
  Oligomer
gugcugccaaaugcucaaa

SEQ ID NO: 6149 - RNA, 19 nt, artificial
  Oligomer
ucucuuccaugaggaaaua

SEQ ID NO: 6150 - RNA, 19 nt, artificial
  Oligomer
ugaguaaacaaagcaucuc

SEQ ID NO: 6151 - RNA, 19 nt, artificial
  Oligomer
gaauaggaguuuuccucug

SEQ ID NO: 6152 - RNA, 19 nt, artificial
  Oligomer
cccuaauaccagaauagga

SEQ ID NO: 6153 - RNA, 19 nt, artificial
  Oligomer
ucaacugcaugcugauucu

SEQ ID NO: 6154 - RNA, 19 nt, artificial
  Oligomer
ccauuuuugucauucuggu

SEQ ID NO: 6155 - RNA, 19 nt, artificial
  Oligomer
ggccaaucacuuugcugug

SEQ ID NO: 6156 - RNA, 19 nt, artificial
  Oligomer
ugccugaauuucaacugca

SEQ ID NO: 6157 - RNA, 19 nt, artificial
  Oligomer
cagccugccugaauuucaa

SEQ ID NO: 6158 - RNA, 19 nt, artificial
  Oligomer
gcugugauaagcaggaguu

SEQ ID NO: 6159 - RNA, 19 nt, artificial
  Oligomer
uggcugugauaagcaggag

SEQ ID NO: 6160 - RNA, 19 nt, artificial
  Oligomer
guggcugugauaagcagga

SEQ ID NO: 6161 - RNA, 19 nt, artificial
  Oligomer
gggacaauacauuuuuguc

SEQ ID NO: 6162 - RNA, 19 nt, artificial
  Oligomer
ggaaacccuccuaugacuu

SEQ ID NO: 6163 - RNA, 19 nt, artificial
  Oligomer
cugugcauaauauaacagu

SEQ ID NO: 6164 - RNA, 19 nt, artificial
  Oligomer
cugguauuaccggguuuau

SEQ ID NO: 6165 - RNA, 19 nt, artificial
  Oligomer
ucaucacgcugugccucau

SEQ ID NO: 6166 - RNA, 19 nt, artificial
  Oligomer
cucgaaagagaauaaagaa

SEQ ID NO: 6167 - RNA, 19 nt, artificial
  Oligomer
gacuaugaagguuuuucuu

SEQ ID NO: 6168 - RNA, 19 nt, artificial
  Oligomer
ugagaauauuggcccuuuc

SEQ ID NO: 6169 - RNA, 19 nt, artificial
  Oligomer
uggagaggguaccucaguu

SEQ ID NO: 6170 - RNA, 19 nt, artificial
  Oligomer
gucaggcucuguuuauugu

SEQ ID NO: 6171 - RNA, 19 nt, artificial
  Oligomer
cugcaccucagguaucaau

SEQ ID NO: 6172 - RNA, 19 nt, artificial
  Oligomer
cucugcgauucacaccauu

SEQ ID NO: 6173 - RNA, 19 nt, artificial
  Oligomer
gaacucaguuguucuuugu

SEQ ID NO: 6174 - RNA, 19 nt, artificial
  Oligomer
gucucauauuggucauucc

SEQ ID NO: 6175 - RNA, 19 nt, artificial
  Oligomer
cuaaaucacuguuagugug

SEQ ID NO: 6176 - RNA, 19 nt, artificial
  Oligomer
ucacacucaauaguauguu

SEQ ID NO: 6177 - RNA, 19 nt, artificial
  Oligomer
cacacaaaauggaucgcau

SEQ ID NO: 6178 - RNA, 19 nt, artificial
  Oligomer
ggaaucugauucucccuag

SEQ ID NO: 6179 - RNA, 19 nt, artificial
  Oligomer
ccaaaggaaucugauucuc

SEQ ID NO: 6180 - RNA, 19 nt, artificial
  Oligomer
caacacuuauuagugacag

SEQ ID NO: 6181 - RNA, 19 nt, artificial
  Oligomer
ucaacacuuauuagugaca

SEQ ID NO: 6182 - RNA, 19 nt, artificial
  Oligomer
gugcugcucaacaagaguu

SEQ ID NO: 6183 - RNA, 19 nt, artificial
  Oligomer
cccaucuuacuccagguuu

SEQ ID NO: 6184 - RNA, 19 nt, artificial
  Oligomer
uaaugguuuucccuuaaag

SEQ ID NO: 6185 - RNA, 19 nt, artificial
  Oligomer
ccuaauaccagaauaggag

SEQ ID NO: 6186 - RNA, 19 nt, artificial
  Oligomer
uugcaagucaacacccuaa

SEQ ID NO: 6187 - RNA, 19 nt, artificial
  Oligomer
gccaaucacuuugcugugc

SEQ ID NO: 6188 - RNA, 19 nt, artificial
  Oligomer
ucaggccaaucacuuugcu

SEQ ID NO: 6189 - RNA, 19 nt, artificial
  Oligomer
ggcugugauaagcaggagu

SEQ ID NO: 6190 - RNA, 19 nt, artificial
  Oligomer
agugcccaaagguguccaa

SEQ ID NO: 6191 - RNA, 19 nt, artificial
  Oligomer
ccuccuaugacuuggaaau

SEQ ID NO: 6192 - RNA, 19 nt, artificial
  Oligomer
acccuccuaugacuuggaa

SEQ ID NO: 6193 - RNA, 19 nt, artificial
  Oligomer
ucugguauuaccggguuua

SEQ ID NO: 6194 - RNA, 19 nt, artificial
  Oligomer
aucacgcugugccucauau

SEQ ID NO: 6195 - RNA, 19 nt, artificial
  Oligomer
aucucaauuuugcucgaaa

SEQ ID NO: 6196 - RNA, 19 nt, artificial
  Oligomer
uucugauccuuauucagua

SEQ ID NO: 6197 - RNA, 19 nt, artificial
  Oligomer
cugcuuuugcaauuguguu

SEQ ID NO: 6198 - RNA, 19 nt, artificial
  Oligomer
ugaagguuuuucuuaguuc

SEQ ID NO: 6199 - RNA, 19 nt, artificial
  Oligomer
ccuguguuauccaguuaug

SEQ ID NO: 6200 - RNA, 19 nt, artificial
  Oligomer
ccagcuucauuuguugcuc

SEQ ID NO: 6201 - RNA, 19 nt, artificial
  Oligomer
cacaucuauuuaaugugga

SEQ ID NO: 6202 - RNA, 19 nt, artificial
  Oligomer
ggguaccucaguuauaagg

SEQ ID NO: 6203 - RNA, 19 nt, artificial
  Oligomer
gagaggguaccucaguuau

SEQ ID NO: 6204 - RNA, 19 nt, artificial
  Oligomer
caccucagguaucaauuca

SEQ ID NO: 6205 - RNA, 19 nt, artificial
  Oligomer
gcaccucagguaucaauuc

SEQ ID NO: 6206 - RNA, 19 nt, artificial
  Oligomer
ucacacugcaccucaggua

SEQ ID NO: 6207 - RNA, 19 nt, artificial
  Oligomer
acucugcgauucacaccau

SEQ ID NO: 6208 - RNA, 19 nt, artificial
  Oligomer
agaacucaguuguucuuug

SEQ ID NO: 6209 - RNA, 19 nt, artificial
  Oligomer
ggucacaaauuuugaugcu

SEQ ID NO: 6210 - RNA, 19 nt, artificial
  Oligomer
cugggaacuaaaaccaguu

SEQ ID NO: 6211 - RNA, 19 nt, artificial
  Oligomer
ggcauggaugauugcacuu

SEQ ID NO: 6212 - RNA, 19 nt, artificial
  Oligomer
gagagagucucuaaaucac

SEQ ID NO: 6213 - RNA, 19 nt, artificial
  Oligomer
cugaauauauguucaagag

SEQ ID NO: 6214 - RNA, 19 nt, artificial
  Oligomer
acacucaauaguauguucu

SEQ ID NO: 6215 - RNA, 19 nt, artificial
  Oligomer
cucuauacagagaucaaau

SEQ ID NO: 6216 - RNA, 19 nt, artificial
  Oligomer
ccuaaaauuaacaacccag

SEQ ID NO: 6217 - RNA, 19 nt, artificial
  Oligomer
ggaucgcaucugugugacu

SEQ ID NO: 6218 - RNA, 19 nt, artificial
  Oligomer
uccguaaauacacacacaa

SEQ ID NO: 6219 - RNA, 19 nt, artificial
  Oligomer
gguggagaauuaaccuccu

SEQ ID NO: 6220 - RNA, 19 nt, artificial
  Oligomer
gcacauucuuauuugaagc

SEQ ID NO: 6221 - RNA, 19 nt, artificial
  Oligomer
gacaacuggacaggaaucu

SEQ ID NO: 6222 - RNA, 19 nt, artificial
  Oligomer
gaaugaauuuagaaccaca

SEQ ID NO: 6223 - RNA, 19 nt, artificial
  Oligomer
gagagcggauacucaagua

SEQ ID NO: 6224 - RNA, 19 nt, artificial
  Oligomer
gggccagauguucuuucua

SEQ ID NO: 6225 - RNA, 19 nt, artificial
  Oligomer
gugacaguauugacaucug

SEQ ID NO: 6226 - RNA, 19 nt, artificial
  Oligomer
gagugucucaacacuuauu

SEQ ID NO: 6227 - RNA, 19 nt, artificial
  Oligomer
cugcucaacaagaguucga

SEQ ID NO: 6228 - RNA, 19 nt, artificial
  Oligomer
gaaaccaaggaguagcuau

SEQ ID NO: 6229 - RNA, 19 nt, artificial
  Oligomer
agguucaguaacuucccua

SEQ ID NO: 6230 - RNA, 19 nt, artificial
  Oligomer
cucuaugguuuugagagca

SEQ ID NO: 6231 - RNA, 19 nt, artificial
  Oligomer
cccuuaaaggaaugucaaa

SEQ ID NO: 6232 - RNA, 19 nt, artificial
  Oligomer
guggguugugcugccaaau

SEQ ID NO: 6233 - RNA, 19 nt, artificial
  Oligomer
cucuuccaugaggaaauaa

SEQ ID NO: 6234 - RNA, 19 nt, artificial
  Oligomer
ggccugaaacaaaagacuu

SEQ ID NO: 6235 - RNA, 19 nt, artificial
  Oligomer
gcagccugccugaauuuca

SEQ ID NO: 6236 - RNA, 19 nt, artificial
  Oligomer
ucaccaagguggucacuca

SEQ ID NO: 6237 - RNA, 19 nt, artificial
  Oligomer
guaucucugugagagguug

SEQ ID NO: 6238 - RNA, 19 nt, artificial
  Oligomer
cuguaucucugugagaggu

SEQ ID NO: 6239 - RNA, 19 nt, artificial
  Oligomer
uggaaacccuccuaugacu

SEQ ID NO: 6240 - RNA, 19 nt, artificial
  Oligomer
cccaaucccucaguuugcu

SEQ ID NO: 6241 - RNA, 19 nt, artificial
  Oligomer
ucauuggccuugccaucca

SEQ ID NO: 6242 - RNA, 19 nt, artificial
  Oligomer
agaggguaccucaguuaua

SEQ ID NO: 6243 - RNA, 19 nt, artificial
  Oligomer
ugcacaucuauuuaaugug

SEQ ID NO: 6244 - RNA, 19 nt, artificial
  Oligomer
accaggaugguuucugcuu

SEQ ID NO: 6245 - RNA, 19 nt, artificial
  Oligomer
gcgauucacaccauugcac

SEQ ID NO: 6246 - RNA, 19 nt, artificial
  Oligomer
cuauuccuuucgucuccca

SEQ ID NO: 6247 - RNA, 19 nt, artificial
  Oligomer
uacacauacugauguuguu

SEQ ID NO: 6248 - RNA, 19 nt, artificial
  Oligomer
gguauacacauacugaugu

SEQ ID NO: 6249 - RNA, 19 nt, artificial
  Oligomer
gggcagaagacugguuuag

SEQ ID NO: 6250 - RNA, 19 nt, artificial
  Oligomer
gaagggcagaagacugguu

SEQ ID NO: 6251 - RNA, 19 nt, artificial
  Oligomer
cucccauuucugggaacua

SEQ ID NO: 6252 - RNA, 19 nt, artificial
  Oligomer
agagagagucucuaaauca

SEQ ID NO: 6253 - RNA, 19 nt, artificial
  Oligomer
ucucuauacagagaucaaa

SEQ ID NO: 6254 - RNA, 19 nt, artificial
  Oligomer
cccagaaacaaaaaucucu

SEQ ID NO: 6255 - RNA, 19 nt, artificial
  Oligomer
acaaaauggaucgcaucug

SEQ ID NO: 6256 - RNA, 19 nt, artificial
  Oligomer
gacucuggcucaucuaguc

SEQ ID NO: 6257 - RNA, 19 nt, artificial
  Oligomer
cacauucuuauuugaagca

SEQ ID NO: 6258 - RNA, 19 nt, artificial
  Oligomer
aagaacaaaaagaaaaccc

SEQ ID NO: 6259 - RNA, 19 nt, artificial
  Oligomer
uuauguccuaaugaucugg

SEQ ID NO: 6260 - RNA, 19 nt, artificial
  Oligomer
gugauaauuaauaugaggc

SEQ ID NO: 6261 - RNA, 19 nt, artificial
  Oligomer
aagcugguuuuaauuaugc

SEQ ID NO: 6262 - RNA, 19 nt, artificial
  Oligomer
aacaaaaagaaaacccugc

SEQ ID NO: 6263 - RNA, 19 nt, artificial
  Oligomer
aauucauuaucccaguugg

SEQ ID NO: 6264 - RNA, 19 nt, artificial
  Oligomer
aaugaccaauaugagaccc

SEQ ID NO: 6265 - RNA, 19 nt, artificial
  Oligomer
ugucuugaauucauuaucc

SEQ ID NO: 6266 - RNA, 19 nt, artificial
  Oligomer
augcaguugaaauucaggc

SEQ ID NO: 6267 - RNA, 19 nt, artificial
  Oligomer
auuaauaugaggcacagcg

SEQ ID NO: 6268 - RNA, 19 nt, artificial
  Oligomer
aauuaugcacauagguuag

SEQ ID NO: 6269 - RNA, 19 nt, artificial
  Oligomer
cuguugaauagaugaauug

SEQ ID NO: 6270 - RNA, 19 nt, artificial
  Oligomer
aauaaaccauuagucacac

SEQ ID NO: 6271 - RNA, 19 nt, artificial
  Oligomer
uaucuuggcauuguguggu

SEQ ID NO: 6272 - RNA, 19 nt, artificial
  Oligomer
auuuugaggauucugaggc

SEQ ID NO: 6273 - RNA, 19 nt, artificial
  Oligomer
uuuguuuacucaggguuuc

SEQ ID NO: 6274 - RNA, 19 nt, artificial
  Oligomer
acuuucauaacuuaguugg

SEQ ID NO: 6275 - RNA, 19 nt, artificial
  Oligomer
uuaaauagaugugcaaugg

SEQ ID NO: 6276 - RNA, 19 nt, artificial
  Oligomer
auagaugaauugauaccug

SEQ ID NO: 6277 - RNA, 19 nt, artificial
  Oligomer
uucagaaaggcuauauucg

SEQ ID NO: 6278 - RNA, 19 nt, artificial
  Oligomer
uauauucgcacagcaggcc

SEQ ID NO: 6279 - RNA, 19 nt, artificial
  Oligomer
agaacaaaaagaaaacccu

SEQ ID NO: 6280 - RNA, 19 nt, artificial
  Oligomer
aguucaauauucauaaggg

SEQ ID NO: 6281 - RNA, 19 nt, artificial
  Oligomer
acuuugggcaggaaauuag

SEQ ID NO: 6282 - RNA, 19 nt, artificial
  Oligomer
uucugguauuaggguguug

SEQ ID NO: 6283 - RNA, 19 nt, artificial
  Oligomer
gucuugaauucauuauccc

SEQ ID NO: 6284 - RNA, 19 nt, artificial
  Oligomer
uugaauucauuaucccagu

SEQ ID NO: 6285 - RNA, 19 nt, artificial
  Oligomer
aaguaagaccuccggaugg

SEQ ID NO: 6286 - RNA, 19 nt, artificial
  Oligomer
gauaauuaauaugaggcac

SEQ ID NO: 6287 - RNA, 19 nt, artificial
  Oligomer
uaauuaauaugaggcacag

SEQ ID NO: 6288 - RNA, 19 nt, artificial
  Oligomer
aucagaauuauugacucgg

SEQ ID NO: 6289 - RNA, 19 nt, artificial
  Oligomer
auuauucacauacaaagcc

SEQ ID NO: 6290 - RNA, 19 nt, artificial
  Oligomer
auuaugcacauagguuaga

SEQ ID NO: 6291 - RNA, 19 nt, artificial
  Oligomer
uagaugaauugauaccuga

SEQ ID NO: 6292 - RNA, 19 nt, artificial
  Oligomer
aaacuuuaagaaaucuggg

SEQ ID NO: 6293 - RNA, 19 nt, artificial
  Oligomer
uucuaaacauuuguggcuc

SEQ ID NO: 6294 - RNA, 19 nt, artificial
  Oligomer
aaaaagaaaacccugcucu

SEQ ID NO: 6295 - RNA, 19 nt, artificial
  Oligomer
uuuaggaugaugaugauga

SEQ ID NO: 6296 - RNA, 19 nt, artificial
  Oligomer
uaaaccauuagucacacag

SEQ ID NO: 6297 - RNA, 19 nt, artificial
  Oligomer
cuugaauucauuaucccag

SEQ ID NO: 6298 - RNA, 19 nt, artificial
  Oligomer
uucuucaucuguagcucga

SEQ ID NO: 6299 - RNA, 19 nt, artificial
  Oligomer
aagacuucaaaguaagacc

SEQ ID NO: 6300 - RNA, 19 nt, artificial
  Oligomer
cacaguuuuaagaauuccc

SEQ ID NO: 6301 - RNA, 19 nt, artificial
  Oligomer
uuuauaaugacaagcacuc

SEQ ID NO: 6302 - RNA, 19 nt, artificial
  Oligomer
uuuaguucauccuaguccc

SEQ ID NO: 6303 - RNA, 19 nt, artificial
  Oligomer
cucccauucucuuuucucc

SEQ ID NO: 6304 - RNA, 19 nt, artificial
  Oligomer
ucuaaacauuuguggcucc

SEQ ID NO: 6305 - RNA, 19 nt, artificial
  Oligomer
uauuuacggaaaauaaggg

SEQ ID NO: 6306 - RNA, 19 nt, artificial
  Oligomer
guucaauauucauaagggc

SEQ ID NO: 6307 - RNA, 19 nt, artificial
  Oligomer
aucuuggcauugugugguu

SEQ ID NO: 6308 - RNA, 19 nt, artificial
  Oligomer
uugugugguucuaaauuca

SEQ ID NO: 6309 - RNA, 19 nt, artificial
  Oligomer
uagagcuccacauaaaugu

SEQ ID NO: 6310 - RNA, 19 nt, artificial
  Oligomer
uuguuuacucaggguuuca

SEQ ID NO: 6311 - RNA, 19 nt, artificial
  Oligomer
uguuuacucaggguuucag

SEQ ID NO: 6312 - RNA, 19 nt, artificial
  Oligomer
uguuauauuaugcacagcc

SEQ ID NO: 6313 - RNA, 19 nt, artificial
  Oligomer
aaagacuucaaaguaagac

SEQ ID NO: 6314 - RNA, 19 nt, artificial
  Oligomer
uaguugagcacaguuuuaa

SEQ ID NO: 6315 - RNA, 19 nt, artificial
  Oligomer
uuauucacauacaaagccu

SEQ ID NO: 6316 - RNA, 19 nt, artificial
  Oligomer
aguaccuguuaauaaaugc

SEQ ID NO: 6317 - RNA, 19 nt, artificial
  Oligomer
cugguuuuaauuaugcaca

SEQ ID NO: 6318 - RNA, 19 nt, artificial
  Oligomer
uuaugcacauagguuagaa

SEQ ID NO: 6319 - RNA, 19 nt, artificial
  Oligomer
cuuugguguaaagaauuga

SEQ ID NO: 6320 - RNA, 19 nt, artificial
  Oligomer
uuucagaaaggcuauauuc

SEQ ID NO: 6321 - RNA, 19 nt, artificial
  Oligomer
gaaugaccaauaugagacc

SEQ ID NO: 6322 - RNA, 19 nt, artificial
  Oligomer
aagaaaacccugcucuugg

SEQ ID NO: 6323 - RNA, 19 nt, artificial
  Oligomer
cuaucuuggcauugugugg

SEQ ID NO: 6324 - RNA, 19 nt, artificial
  Oligomer
auuaacuccaaucaaucca

SEQ ID NO: 6325 - RNA, 19 nt, artificial
  Oligomer
gaaagaguaucaaaccugg

SEQ ID NO: 6326 - RNA, 19 nt, artificial
  Oligomer
aagaguaucaaaccuggag

SEQ ID NO: 6327 - RNA, 19 nt, artificial
  Oligomer
aaguuacugaaccuuuuga

SEQ ID NO: 6328 - RNA, 19 nt, artificial
  Oligomer
uuacugaaccuuuugaucc

SEQ ID NO: 6329 - RNA, 19 nt, artificial
  Oligomer
cuuguugaaaaugaaaugc

SEQ ID NO: 6330 - RNA, 19 nt, artificial
  Oligomer
uugcaauugucuugaauuc

SEQ ID NO: 6331 - RNA, 19 nt, artificial
  Oligomer
auuggccugagacucaucc

SEQ ID NO: 6332 - RNA, 19 nt, artificial
  Oligomer
uuccuuuccugcaucuggc

SEQ ID NO: 6333 - RNA, 19 nt, artificial
  Oligomer
ucuucuucaucuguagcuc

SEQ ID NO: 6334 - RNA, 19 nt, artificial
  Oligomer
uugagaucgccaaaaccgc

SEQ ID NO: 6335 - RNA, 19 nt, artificial
  Oligomer
acuucaaaguaagaccucc

SEQ ID NO: 6336 - RNA, 19 nt, artificial
  Oligomer
cuucaaaguaagaccuccg

SEQ ID NO: 6337 - RNA, 19 nt, artificial
  Oligomer
uuuugguggaggaagugau

SEQ ID NO: 6338 - RNA, 19 nt, artificial
  Oligomer
auucacauacaaagccugc

SEQ ID NO: 6339 - RNA, 19 nt, artificial
  Oligomer
uuauaaugacaagcacucu

SEQ ID NO: 6340 - RNA, 19 nt, artificial
  Oligomer
uaguugguuuugaagauag

SEQ ID NO: 6341 - RNA, 19 nt, artificial
  Oligomer
cacauagguuagaaagggc

SEQ ID NO: 6342 - RNA, 19 nt, artificial
  Oligomer
augaauugauaccugaggu

SEQ ID NO: 6343 - RNA, 19 nt, artificial
  Oligomer
acaaaaagaaaacccugcu

SEQ ID NO: 6344 - RNA, 19 nt, artificial
  Oligomer
auccaugccaccauuuuau

SEQ ID NO: 6345 - RNA, 19 nt, artificial
  Oligomer
auaaaccauuagucacaca

SEQ ID NO: 6346 - RNA, 19 nt, artificial
  Oligomer
auauucauaagggcuagcu

SEQ ID NO: 6347 - RNA, 19 nt, artificial
  Oligomer
uuugggcaggaaauuaguc

SEQ ID NO: 6348 - RNA, 19 nt, artificial
  Oligomer
caacccucuuuuuucaugc

SEQ ID NO: 6349 - RNA, 19 nt, artificial
  Oligomer
aauucuaucuuggcauugu

SEQ ID NO: 6350 - RNA, 19 nt, artificial
  Oligomer
auucuaucuuggcauugug

SEQ ID NO: 6351 - RNA, 19 nt, artificial
  Oligomer
ucuuggcauugugugguuc

SEQ ID NO: 6352 - RNA, 19 nt, artificial
  Oligomer
cucucaacauguauuaugu

SEQ ID NO: 6353 - RNA, 19 nt, artificial
  Oligomer
agaaauauauagcuacucc

SEQ ID NO: 6354 - RNA, 19 nt, artificial
  Oligomer
uuuugaggauucugaggca

SEQ ID NO: 6355 - RNA, 19 nt, artificial
  Oligomer
cucaaaaccauagagcucc

SEQ ID NO: 6356 - RNA, 19 nt, artificial
  Oligomer
guuuacucaggguuucagc

SEQ ID NO: 6357 - RNA, 19 nt, artificial
  Oligomer
ucugguauuaggguguuga

SEQ ID NO: 6358 - RNA, 19 nt, artificial
  Oligomer
uguaaaagaacuuaggugg

SEQ ID NO: 6359 - RNA, 19 nt, artificial
  Oligomer
cuucuucaucuguagcucg

SEQ ID NO: 6360 - RNA, 19 nt, artificial
  Oligomer
aauuaauaugaggcacagc

SEQ ID NO: 6361 - RNA, 19 nt, artificial
  Oligomer
agauaacuuucauuuugcc

SEQ ID NO: 6362 - RNA, 19 nt, artificial
  Oligomer
auaacuuucauuuugccug

SEQ ID NO: 6363 - RNA, 19 nt, artificial
  Oligomer
uaacuuucauuuugccugu

SEQ ID NO: 6364 - RNA, 19 nt, artificial
  Oligomer
aaggaucagaauuauugac

SEQ ID NO: 6365 - RNA, 19 nt, artificial
  Oligomer
ucagaauuauugacucggg

SEQ ID NO: 6366 - RNA, 19 nt, artificial
  Oligomer
uuuuaauaguugagcacag

SEQ ID NO: 6367 - RNA, 19 nt, artificial
  Oligomer
agcacaguuuuaagaauuc

SEQ ID NO: 6368 - RNA, 19 nt, artificial
  Oligomer
gcacaguuuuaagaauucc

SEQ ID NO: 6369 - RNA, 19 nt, artificial
  Oligomer
aaaagcagaagaacuaaga

SEQ ID NO: 6370 - RNA, 19 nt, artificial
  Oligomer
cuuuuauaaugacaagcac

SEQ ID NO: 6371 - RNA, 19 nt, artificial
  Oligomer
uucucagacuccuuauaac

SEQ ID NO: 6372 - RNA, 19 nt, artificial
  Oligomer
uugaaacaauaaacagagc

SEQ ID NO: 6373 - RNA, 19 nt, artificial
  Oligomer
gaugaauugauaccugagg

SEQ ID NO: 6374 - RNA, 19 nt, artificial
  Oligomer
ugguacauuucagaaaggc

SEQ ID NO: 6375 - RNA, 19 nt, artificial
  Oligomer
guucuuauuuaguucaucc

SEQ ID NO: 6376 - RNA, 19 nt, artificial
  Oligomer
agaguucuaaacauuugug

SEQ ID NO: 6377 - RNA, 19 nt, artificial
  Oligomer
aguucuaaacauuuguggc

SEQ ID NO: 6378 - RNA, 19 nt, artificial
  Oligomer
guucuaaacauuuguggcu

SEQ ID NO: 6379 - RNA, 19 nt, artificial
  Oligomer
caaaaagaaaacccugcuc

SEQ ID NO: 6380 - RNA, 19 nt, artificial
  Oligomer
uucagaacauacuauugag

SEQ ID NO: 6381 - RNA, 19 nt, artificial
  Oligomer
auuuuuguuucuggguugu

SEQ ID NO: 6382 - RNA, 19 nt, artificial
  Oligomer
acauauuugucacaauucc

SEQ ID NO: 6383 - RNA, 19 nt, artificial
  Oligomer
aauauucauaagggcuagc

SEQ ID NO: 6384 - RNA, 19 nt, artificial
  Oligomer
uauuuuauagcacaaggag

SEQ ID NO: 6385 - RNA, 19 nt, artificial
  Oligomer
auuuuauagcacaaggagc

SEQ ID NO: 6386 - RNA, 19 nt, artificial
  Oligomer
guaugauaauaaugauggc

SEQ ID NO: 6387 - RNA, 19 nt, artificial
  Oligomer
caaaccuggaguaagaugg

SEQ ID NO: 6388 - RNA, 19 nt, artificial
  Oligomer
uacugaaccuuuugauccu

SEQ ID NO: 6389 - RNA, 19 nt, artificial
  Oligomer
aaggacagcagauuucgac

SEQ ID NO: 6390 - RNA, 19 nt, artificial
  Oligomer
aaccuuuugauccuuuccc

SEQ ID NO: 6391 - RNA, 19 nt, artificial
  Oligomer
gaguccaagaaucuuuucc

SEQ ID NO: 6392 - RNA, 19 nt, artificial
  Oligomer
aguccaagaaucuuuuccc

SEQ ID NO: 6393 - RNA, 19 nt, artificial
  Oligomer
gaugcuuuguuuacucagg

SEQ ID NO: 6394 - RNA, 19 nt, artificial
  Oligomer
aauauuuguaccagacuga

SEQ ID NO: 6395 - RNA, 19 nt, artificial
  Oligomer
acaaaaauguauuguccca

SEQ ID NO: 6396 - RNA, 19 nt, artificial
  Oligomer
caaaaauguauugucccac

SEQ ID NO: 6397 - RNA, 19 nt, artificial
  Oligomer
aaaaauguauugucccacu

SEQ ID NO: 6398 - RNA, 19 nt, artificial
  Oligomer
uggaauaucauaaacccgg

SEQ ID NO: 6399 - RNA, 19 nt, artificial
  Oligomer
ggcauuccuuuauuuuucc

SEQ ID NO: 6400 - RNA, 19 nt, artificial
  Oligomer
augacaaaaauggagagcc

SEQ ID NO: 6401 - RNA, 19 nt, artificial
  Oligomer
uuaauaugaggcacagcgu

SEQ ID NO: 6402 - RNA, 19 nt, artificial
  Oligomer
gguucuuuauucucuuucg

SEQ ID NO: 6403 - RNA, 19 nt, artificial
  Oligomer
auuauugacucgggcauuc

SEQ ID NO: 6404 - RNA, 19 nt, artificial
  Oligomer
uauucacauacaaagccug

SEQ ID NO: 6405 - RNA, 19 nt, artificial
  Oligomer
ugaaacaauaaacagagcc

SEQ ID NO: 6406 - RNA, 19 nt, artificial
  Oligomer
uaguaugacaaagaacaac

SEQ ID NO: 6407 - RNA, 19 nt, artificial
  Oligomer
uaugacaaagaacaacuga

SEQ ID NO: 6408 - RNA, 19 nt, artificial
  Oligomer
augacaaagaacaacugag

SEQ ID NO: 6409 - RNA, 19 nt, artificial
  Oligomer
acucucccauucucuuuuc

SEQ ID NO: 6410 - RNA, 19 nt, artificial
  Oligomer
uucuccuuauuuccuuuuc

SEQ ID NO: 6411 - RNA, 19 nt, artificial
  Oligomer
gaagaguucuaaacauuug

SEQ ID NO: 6412 - RNA, 19 nt, artificial
  Oligomer
aacagugauuuagagacuc

SEQ ID NO: 6413 - RNA, 19 nt, artificial
  Oligomer
aaaugaccauaucagauac

SEQ ID NO: 6414 - RNA, 19 nt, artificial
  Oligomer
aacccucuuuuuucaugcu

SEQ ID NO: 6415 - RNA, 19 nt, artificial
  Oligomer
uucuaucuuggcauugugu

SEQ ID NO: 6416 - RNA, 19 nt, artificial
  Oligomer
auccaauauucuucuguag

SEQ ID NO: 6417 - RNA, 19 nt, artificial
  Oligomer
uauauagcuacuccuuggu

SEQ ID NO: 6418 - RNA, 19 nt, artificial
  Oligomer
uuugaggauucugaggcag

SEQ ID NO: 6419 - RNA, 19 nt, artificial
  Oligomer
aggcagcucaguauugugg

SEQ ID NO: 6420 - RNA, 19 nt, artificial
  Oligomer
auuguggaaagaguaucaa

SEQ ID NO: 6421 - RNA, 19 nt, artificial
  Oligomer
uuuaagggaaaaccauuac

SEQ ID NO: 6422 - RNA, 19 nt, artificial
  Oligomer
cacauuuauuuccucaugg

SEQ ID NO: 6423 - RNA, 19 nt, artificial
  Oligomer
ugaaaaugaaaugcacucc

SEQ ID NO: 6424 - RNA, 19 nt, artificial
  Oligomer
uuggagaugcuuuguuuac

SEQ ID NO: 6425 - RNA, 19 nt, artificial
  Oligomer
ugugaucacaucuuucucc

SEQ ID NO: 6426 - RNA, 19 nt, artificial
  Oligomer
cagacugacuugagaaugg

SEQ ID NO: 6427 - RNA, 19 nt, artificial
  Oligomer
uaguuuccacgcaucuuga

SEQ ID NO: 6428 - RNA, 19 nt, artificial
  Oligomer
uuccacgcaucuugaaacu

SEQ ID NO: 6429 - RNA, 19 nt, artificial
  Oligomer
ccacgcaucuugaaacucc

SEQ ID NO: 6430 - RNA, 19 nt, artificial
  Oligomer
auggauacuaaagaagucu

SEQ ID NO: 6431 - RNA, 19 nt, artificial
  Oligomer
uacuaaagaagucuuccuc

SEQ ID NO: 6432 - RNA, 19 nt, artificial
  Oligomer
aucuguagcucgaugguuu

SEQ ID NO: 6433 - RNA, 19 nt, artificial
  Oligomer
caaaaccgcaccaaccucu

SEQ ID NO: 6434 - RNA, 19 nt, artificial
  Oligomer
aaaaccgcaccaaccucuc

SEQ ID NO: 6435 - RNA, 19 nt, artificial
  Oligomer
aaugacaaaaauggagagc

SEQ ID NO: 6436 - RNA, 19 nt, artificial
  Oligomer
ucugagauuuuuuguucac

SEQ ID NO: 6437 - RNA, 19 nt, artificial
  Oligomer
uaauaugaggcacagcgug

SEQ ID NO: 6438 - RNA, 19 nt, artificial
  Oligomer
cagaauuauugacucgggc

SEQ ID NO: 6439 - RNA, 19 nt, artificial
  Oligomer
cauuuuaauaguugagcac

SEQ ID NO: 6440 - RNA, 19 nt, artificial
  Oligomer
uuuaauaguugagcacagu

SEQ ID NO: 6441 - RNA, 19 nt, artificial
  Oligomer
uucacauacaaagccugca

SEQ ID NO: 6442 - RNA, 19 nt, artificial
  Oligomer
agaagaacuaagaaaaacc

SEQ ID NO: 6443 - RNA, 19 nt, artificial
  Oligomer
gaagaacuaagaaaaaccu

SEQ ID NO: 6444 - RNA, 19 nt, artificial
  Oligomer
agaacuaagaaaaaccuuc

SEQ ID NO: 6445 - RNA, 19 nt, artificial
  Oligomer
aaacaaugcuucaucauuc

SEQ ID NO: 6446 - RNA, 19 nt, artificial
  Oligomer
aacaaugcuucaucauucu

SEQ ID NO: 6447 - RNA, 19 nt, artificial
  Oligomer
aaugcuucaucauucuuag

SEQ ID NO: 6448 - RNA, 19 nt, artificial
  Oligomer
augacaagcacucuuauau

SEQ ID NO: 6449 - RNA, 19 nt, artificial
  Oligomer
gacaagcacucuuauauuc

SEQ ID NO: 6450 - RNA, 19 nt, artificial
  Oligomer
gcacauagguuagaaaggg

SEQ ID NO: 6451 - RNA, 19 nt, artificial
  Oligomer
cauuucagaaaggcuauau

SEQ ID NO: 6452 - RNA, 19 nt, artificial
  Oligomer
auauucgcacagcaggccu

SEQ ID NO: 6453 - RNA, 19 nt, artificial
  Oligomer
cuuauuuaguucauccuag

SEQ ID NO: 6454 - RNA, 19 nt, artificial
  Oligomer
cuagucccuugaauaaucc

SEQ ID NO: 6455 - RNA, 19 nt, artificial
  Oligomer
uuauuuucucucacucucc

SEQ ID NO: 6456 - RNA, 19 nt, artificial
  Oligomer
uauuuucucucacucuccc

SEQ ID NO: 6457 - RNA, 19 nt, artificial
  Oligomer
cucucccauucucuuuucu

SEQ ID NO: 6458 - RNA, 19 nt, artificial
  Oligomer
cucuuuucuccuuauuucc

SEQ ID NO: 6459 - RNA, 19 nt, artificial
  Oligomer
ucuccuuauuuccuuuucc

SEQ ID NO: 6460 - RNA, 19 nt, artificial
  Oligomer
uaccgaaguugaagaguuc

SEQ ID NO: 6461 - RNA, 19 nt, artificial
  Oligomer
cuaaacauuuguggcucca

SEQ ID NO: 6462 - RNA, 19 nt, artificial
  Oligomer
aagaggaagacguucaacc

SEQ ID NO: 6463 - RNA, 19 nt, artificial
  Oligomer
aaagaaaacccugcucuug

SEQ ID NO: 6464 - RNA, 19 nt, artificial
  Oligomer
uaacagugauuuagagacu

SEQ ID NO: 6465 - RNA, 19 nt, artificial
  Oligomer
acagugauuuagagacucu

SEQ ID NO: 6466 - RNA, 19 nt, artificial
  Oligomer
uuuuguuucuggguuguua

SEQ ID NO: 6467 - RNA, 19 nt, artificial
  Oligomer
ucuggguuguuaauuuuag

SEQ ID NO: 6468 - RNA, 19 nt, artificial
  Oligomer
uggguuguuaauuuuagga

SEQ ID NO: 6469 - RNA, 19 nt, artificial
  Oligomer
uucaauauucauaagggcu

SEQ ID NO: 6470 - RNA, 19 nt, artificial
  Oligomer
auucauaagggcuagcugg

SEQ ID NO: 6471 - RNA, 19 nt, artificial
  Oligomer
uaauucuaucuuggcauug

SEQ ID NO: 6472 - RNA, 19 nt, artificial
  Oligomer
cauuaacuccaaucaaucc

SEQ ID NO: 6473 - RNA, 19 nt, artificial
  Oligomer
aaacugauuuugaggauuc

SEQ ID NO: 6474 - RNA, 19 nt, artificial
  Oligomer
uuuucccuaacuuccacug

SEQ ID NO: 6475 - RNA, 19 nt, artificial
  Oligomer
auguuuguaaaagugcucu

SEQ ID NO: 6476 - RNA, 19 nt, artificial
  Oligomer
uaaaagugcucucaaaacc

SEQ ID NO: 6477 - RNA, 19 nt, artificial
  Oligomer
aagagaaucagcaugcagu

SEQ ID NO: 6478 - RNA, 19 nt, artificial
  Oligomer
uuucaggccugugaucaca

SEQ ID NO: 6479 - RNA, 19 nt, artificial
  Oligomer
aucuuucuccucaucaugg

SEQ ID NO: 6480 - RNA, 19 nt, artificial
  Oligomer
agcaugcaguugaaauuca

SEQ ID NO: 6481 - RNA, 19 nt, artificial
  Oligomer
ugacuugagaauggaugcg

SEQ ID NO: 6482 - RNA, 19 nt, artificial
  Oligomer
ugagaauggaugcgaaggg

SEQ ID NO: 6483 - RNA, 19 nt, artificial
  Oligomer
uuuccacgcaucuugaaac

SEQ ID NO: 6484 - RNA, 19 nt, artificial
  Oligomer
cgcaucuugaaacuccugc

SEQ ID NO: 6485 - RNA, 19 nt, artificial
  Oligomer
auacuaaagaagucuuccu

SEQ ID NO: 6486 - RNA, 19 nt, artificial
  Oligomer
cagagauacagaaacaugg

SEQ ID NO: 6487 - RNA, 19 nt, artificial
  Oligomer
guuauauuaugcacagcca

SEQ ID NO: 6488 - RNA, 19 nt, artificial
  Oligomer
aagagaugauguguguacc

SEQ ID NO: 6489 - RNA, 19 nt, artificial
  Oligomer
agacuucaaaguaagaccu

SEQ ID NO: 6490 - RNA, 19 nt, artificial
  Oligomer
acagcgugaugacaacucc

SEQ ID NO: 6491 - RNA, 19 nt, artificial
  Oligomer
guucuuuauucucuuucga

SEQ ID NO: 6492 - RNA, 19 nt, artificial
  Oligomer
uuucauuuugccugucucc

SEQ ID NO: 6493 - RNA, 19 nt, artificial
  Oligomer
aggaucagaauuauugacu

SEQ ID NO: 6494 - RNA, 19 nt, artificial
  Oligomer
uuauugacucgggcauuca

SEQ ID NO: 6495 - RNA, 19 nt, artificial
  Oligomer
caaacacaauugcaaaagc

SEQ ID NO: 6496 - RNA, 19 nt, artificial
  Oligomer
acaagcacucuuauauuca

SEQ ID NO: 6497 - RNA, 19 nt, artificial
  Oligomer
cagacuccuuauaacugag

SEQ ID NO: 6498 - RNA, 19 nt, artificial
  Oligomer
uagaugugcaaugguguga

SEQ ID NO: 6499 - RNA, 19 nt, artificial
  Oligomer
cuauauucgcacagcaggc

SEQ ID NO: 6500 - RNA, 19 nt, artificial
  Oligomer
uauuugucagaccuacccu

SEQ ID NO: 6501 - RNA, 19 nt, artificial
  Oligomer
guaugacaaagaacaacug

SEQ ID NO: 6502 - RNA, 19 nt, artificial
  Oligomer
uauuuaguucauccuaguc

SEQ ID NO: 6503 - RNA, 19 nt, artificial
  Oligomer
uagucccuugaauaauccc

SEQ ID NO: 6504 - RNA, 19 nt, artificial
  Oligomer
caaaacaacaucaguaugu

SEQ ID NO: 6505 - RNA, 19 nt, artificial
  Oligomer
uuuauuuucucucacucuc

SEQ ID NO: 6506 - RNA, 19 nt, artificial
  Oligomer
ucuuucuccuucuuccuca

SEQ ID NO: 6507 - RNA, 19 nt, artificial
  Oligomer
cucucuugaacauauauuc

SEQ ID NO: 6508 - RNA, 19 nt, artificial
  Oligomer
uuuuaggaugaugaugaug

SEQ ID NO: 6509 - RNA, 19 nt, artificial
  Oligomer
uuugucacaauuccuaagu

SEQ ID NO: 6510 - RNA, 19 nt, artificial
  Oligomer
caauauucauaagggcuag

SEQ ID NO: 6511 - RNA, 19 nt, artificial
  Oligomer
cuccaacccucuuuuuuca

SEQ ID NO: 6512 - RNA, 19 nt, artificial
  Oligomer
auaagaaugugcagaaccc

SEQ ID NO: 6513 - RNA, 19 nt, artificial
  Oligomer
uuaacuccaaucaauccaa

SEQ ID NO: 6514 - RNA, 19 nt, artificial
  Oligomer
augauggcaaaaaugacac

SEQ ID NO: 6515 - RNA, 19 nt, artificial
  Oligomer
aacugauuuugaggauucu

SEQ ID NO: 6516 - RNA, 19 nt, artificial
  Oligomer
uggaaagaguaucaaaccu

SEQ ID NO: 6517 - RNA, 19 nt, artificial
  Oligomer
aaagaguaucaaaccugga

SEQ ID NO: 6518 - RNA, 19 nt, artificial
  Oligomer
auaaucuuagggaaguuac

SEQ ID NO: 6519 - RNA, 19 nt, artificial
  Oligomer
uuugauccuuucccuuuug

SEQ ID NO: 6520 - RNA, 19 nt, artificial
  Oligomer
auugaguccaagaaucuuu

SEQ ID NO: 6521 - RNA, 19 nt, artificial
  Oligomer
aaucuuuucccuaacuucc

SEQ ID NO: 6522 - RNA, 19 nt, artificial
  Oligomer
aauguuuguaaaagugcuc

SEQ ID NO: 6523 - RNA, 19 nt, artificial
  Oligomer
aaacaaucuuugacauucc

SEQ ID NO: 6524 - RNA, 19 nt, artificial
  Oligomer
uugaaaaugaaaugcacuc

SEQ ID NO: 6525 - RNA, 19 nt, artificial
  Oligomer
gaaaaugaaaugcacuccc

SEQ ID NO: 6526 - RNA, 19 nt, artificial
  Oligomer
uauggauacuaaagaaguc

SEQ ID NO: 6527 - RNA, 19 nt, artificial
  Oligomer
ugucaguguaaaagggugc

SEQ ID NO: 6528 - RNA, 19 nt, artificial
  Oligomer
uuguguaaaagaacuuagg

SEQ ID NO: 6529 - RNA, 19 nt, artificial
  Oligomer
aaaauguauugucccacuu

SEQ ID NO: 6530 - RNA, 19 nt, artificial
  Oligomer
uugucccacuuccauuuug

SEQ ID NO: 6531 - RNA, 19 nt, artificial
  Oligomer
augguuuugaaagggugag

SEQ ID NO: 6532 - RNA, 19 nt, artificial
  Oligomer
guugagaucgccaaaaccg

SEQ ID NO: 6533 - RNA, 19 nt, artificial
  Oligomer
aaaccgcaccaaccucuca

SEQ ID NO: 6534 - RNA, 19 nt, artificial
  Oligomer
augcacagccaaacucucu

SEQ ID NO: 6535 - RNA, 19 nt, artificial
  Oligomer
ugcacagccaaacucucug

SEQ ID NO: 6536 - RNA, 19 nt, artificial
  Oligomer
acaaagagaugaugugugu

SEQ ID NO: 6537 - RNA, 19 nt, artificial
  Oligomer
uaccaaaagacuucaaagu

SEQ ID NO: 6538 - RNA, 19 nt, artificial
  Oligomer
gugaugacaacuccaguga

SEQ ID NO: 6539 - RNA, 19 nt, artificial
  Oligomer
uaauaccagacaaagagga

SEQ ID NO: 6540 - RNA, 19 nt, artificial
  Oligomer
aacuuucauuuugccuguc

SEQ ID NO: 6541 - RNA, 19 nt, artificial
  Oligomer
uuucacaaacacaauugca

SEQ ID NO: 6542 - RNA, 19 nt, artificial
  Oligomer
uucacaaacacaauugcaa

SEQ ID NO: 6543 - RNA, 19 nt, artificial
  Oligomer
acaaacacaauugcaaaag

SEQ ID NO: 6544 - RNA, 19 nt, artificial
  Oligomer
aaaccuucauagucuuaag

SEQ ID NO: 6545 - RNA, 19 nt, artificial
  Oligomer
guaccuguuaauaaaugcu

SEQ ID NO: 6546 - RNA, 19 nt, artificial
  Oligomer
augcuaaauacuaagugcu

SEQ ID NO: 6547 - RNA, 19 nt, artificial
  Oligomer
ugaagauagaaaaccuugg

SEQ ID NO: 6548 - RNA, 19 nt, artificial
  Oligomer
aagauagaaaaccuuggag

SEQ ID NO: 6549 - RNA, 19 nt, artificial
  Oligomer
uagaaagggccaauauucu

SEQ ID NO: 6550 - RNA, 19 nt, artificial
  Oligomer
uaaauagaugugcaauggu

SEQ ID NO: 6551 - RNA, 19 nt, artificial
  Oligomer
aguaugacaaagaacaacu

SEQ ID NO: 6552 - RNA, 19 nt, artificial
  Oligomer
accuccuucaauuauauuc

SEQ ID NO: 6553 - RNA, 19 nt, artificial
  Oligomer
uucucucacucucccauuc

SEQ ID NO: 6554 - RNA, 19 nt, artificial
  Oligomer
aaacauuuguggcuccaag

SEQ ID NO: 6555 - RNA, 19 nt, artificial
  Oligomer
cuaacagugauuuagagac

SEQ ID NO: 6556 - RNA, 19 nt, artificial
  Oligomer
cagugauuuagagacucuc

SEQ ID NO: 6557 - RNA, 19 nt, artificial
  Oligomer
gauuuuuguuucuggguug

SEQ ID NO: 6558 - RNA, 19 nt, artificial
  Oligomer
aaugaccauaucagauaca

SEQ ID NO: 6559 - RNA, 19 nt, artificial
  Oligomer
aggagcaggacuagaugag

SEQ ID NO: 6560 - RNA, 19 nt, artificial
  Oligomer
cuucaaauaagaaugugca

SEQ ID NO: 6561 - RNA, 19 nt, artificial
  Oligomer
uucaaauaagaaugugcag

SEQ ID NO: 6562 - RNA, 19 nt, artificial
  Oligomer
augugcagaacccuucagg

SEQ ID NO: 6563 - RNA, 19 nt, artificial
  Oligomer
uuacccugcuguauuagua

SEQ ID NO: 6564 - RNA, 19 nt, artificial
  Oligomer
aauauauagcuacuccuug

SEQ ID NO: 6565 - RNA, 19 nt, artificial
  Oligomer
cugauuuugaggauucuga

SEQ ID NO: 6566 - RNA, 19 nt, artificial
  Oligomer
caguuucauaaucuuaggg

SEQ ID NO: 6567 - RNA, 19 nt, artificial
  Oligomer
aaucuuagggaaguuacug

SEQ ID NO: 6568 - RNA, 19 nt, artificial
  Oligomer
aguuacugaaccuuuugau

SEQ ID NO: 6569 - RNA, 19 nt, artificial
  Oligomer
uugauccuuucccuuuuga

SEQ ID NO: 6570 - RNA, 19 nt, artificial
  Oligomer
uugaguccaagaaucuuuu

SEQ ID NO: 6571 - RNA, 19 nt, artificial
  Oligomer
uuuguccauuuuuaagcag

SEQ ID NO: 6572 - RNA, 19 nt, artificial
  Oligomer
uuguccauuuuuaagcagg

SEQ ID NO: 6573 - RNA, 19 nt, artificial
  Oligomer
aacccacauuuauuuccuc

SEQ ID NO: 6574 - RNA, 19 nt, artificial
  Oligomer
uuagaaguuuuccuuguug

SEQ ID NO: 6575 - RNA, 19 nt, artificial
  Oligomer
uguugaaaaugaaaugcac

SEQ ID NO: 6576 - RNA, 19 nt, artificial
  Oligomer
ucuuuuguuucaggccugu

SEQ ID NO: 6577 - RNA, 19 nt, artificial
  Oligomer
uagauguuguagcugagga

SEQ ID NO: 6578 - RNA, 19 nt, artificial
  Oligomer
uuguuccuuuccugcaucu

SEQ ID NO: 6579 - RNA, 19 nt, artificial
  Oligomer
guuccuuuccugcaucugg

SEQ ID NO: 6580 - RNA, 19 nt, artificial
  Oligomer
gacuugagaauggaugcga

SEQ ID NO: 6581 - RNA, 19 nt, artificial
  Oligomer
aucaccaccucauagcuga

SEQ ID NO: 6582 - RNA, 19 nt, artificial
  Oligomer
cagaaugacaaaaauggag

SEQ ID NO: 6583 - RNA, 19 nt, artificial
  Oligomer
augucaguguaaaagggug

SEQ ID NO: 6584 - RNA, 19 nt, artificial
  Oligomer
uaaaagaacuuagguggaa

SEQ ID NO: 6585 - RNA, 19 nt, artificial
  Oligomer
agauacagaaacaugggac

SEQ ID NO: 6586 - RNA, 19 nt, artificial
  Oligomer
auacagaaacaugggaccc

SEQ ID NO: 6587 - RNA, 19 nt, artificial
  Oligomer
uagguggaauaucauaaac

SEQ ID NO: 6588 - RNA, 19 nt, artificial
  Oligomer
guggaauaucauaaacccg

SEQ ID NO: 6589 - RNA, 19 nt, artificial
  Oligomer
uuaugcacagccaaacucu

SEQ ID NO: 6590 - RNA, 19 nt, artificial
  Oligomer
uguguaccaaaagacuuca

SEQ ID NO: 6591 - RNA, 19 nt, artificial
  Oligomer
augacaacuccagugaugc

SEQ ID NO: 6592 - RNA, 19 nt, artificial
  Oligomer
acuuucauuuugccugucu

SEQ ID NO: 6593 - RNA, 19 nt, artificial
  Oligomer
uugccugucuccaaguuca

SEQ ID NO: 6594 - RNA, 19 nt, artificial
  Oligomer
ugcuacugaauaaggauca

SEQ ID NO: 6595 - RNA, 19 nt, artificial
  Oligomer
agaauuaucucccaggucc

SEQ ID NO: 6596 - RNA, 19 nt, artificial
  Oligomer
aaccuucauagucuuaaga

SEQ ID NO: 6597 - RNA, 19 nt, artificial
  Oligomer
ugcuucaucauucuuagag

SEQ ID NO: 6598 - RNA, 19 nt, artificial
  Oligomer
uucaucauucuuagaguac

SEQ ID NO: 6599 - RNA, 19 nt, artificial
  Oligomer
aucauucuuagaguaccug

SEQ ID NO: 6600 - RNA, 19 nt, artificial
  Oligomer
aacaaaugaagcugguuuu

SEQ ID NO: 6601 - RNA, 19 nt, artificial
  Oligomer
ugacucauaguaauaacac

SEQ ID NO: 6602 - RNA, 19 nt, artificial
  Oligomer
accuaagugucucuaagca

SEQ ID NO: 6603 - RNA, 19 nt, artificial
  Oligomer
cucuaagcagaaaccaucc

SEQ ID NO: 6604 - RNA, 19 nt, artificial
  Oligomer
gaaaggaauaguaguauga

SEQ ID NO: 6605 - RNA, 19 nt, artificial
  Oligomer
aaggaauaguaguaugaca

SEQ ID NO: 6606 - RNA, 19 nt, artificial
  Oligomer
guauguguauaccuccuuc

SEQ ID NO: 6607 - RNA, 19 nt, artificial
  Oligomer
cuuuucuccuuauuuccuu

SEQ ID NO: 6608 - RNA, 19 nt, artificial
  Oligomer
uuuuccuccuaaaccaguc

SEQ ID NO: 6609 - RNA, 19 nt, artificial
  Oligomer
uccuucuuccucauuaccg

SEQ ID NO: 6610 - RNA, 19 nt, artificial
  Oligomer
cauuaccgaaguugaagag

SEQ ID NO: 6611 - RNA, 19 nt, artificial
  Oligomer
ugaagugcaaucauccaug

SEQ ID NO: 6612 - RNA, 19 nt, artificial
  Oligomer
aacauuuguggcuccaagg

SEQ ID NO: 6613 - RNA, 19 nt, artificial
  Oligomer
acauuuguggcuccaaggg

SEQ ID NO: 6614 - RNA, 19 nt, artificial
  Oligomer
acuauugagugugaauuug

SEQ ID NO: 6615 - RNA, 19 nt, artificial
  Oligomer
augaccauaucagauacau

SEQ ID NO: 6616 - RNA, 19 nt, artificial
  Oligomer
auuugucacaauuccuaag

SEQ ID NO: 6617 - RNA, 19 nt, artificial
  Oligomer
aaggagcaggacuagauga

SEQ ID NO: 6618 - RNA, 19 nt, artificial
  Oligomer
aauucuccaccuccaaccc

SEQ ID NO: 6619 - RNA, 19 nt, artificial
  Oligomer
caugcuucaaauaagaaug

SEQ ID NO: 6620 - RNA, 19 nt, artificial
  Oligomer
gguaaaugaugaguauuac

SEQ ID NO: 6621 - RNA, 19 nt, artificial
  Oligomer
uugguuuccuucuucuuuu

SEQ ID NO: 6622 - RNA, 19 nt, artificial
  Oligomer
ugguuuccuucuucuuuug

SEQ ID NO: 6623 - RNA, 19 nt, artificial
  Oligomer
uugaggauucugaggcagc

SEQ ID NO: 6624 - RNA, 19 nt, artificial
  Oligomer
ggaaagaguaucaaaccug

SEQ ID NO: 6625 - RNA, 19 nt, artificial
  Oligomer
uaucaaaccuggaguaaga

SEQ ID NO: 6626 - RNA, 19 nt, artificial
  Oligomer
acaguuucauaaucuuagg

SEQ ID NO: 6627 - RNA, 19 nt, artificial
  Oligomer
aguuucauaaucuuaggga

SEQ ID NO: 6628 - RNA, 19 nt, artificial
  Oligomer
uuuugauccuuucccuuuu

SEQ ID NO: 6629 - RNA, 19 nt, artificial
  Oligomer
guccaagaaucuuuucccu

SEQ ID NO: 6630 - RNA, 19 nt, artificial
  Oligomer
uuucccuaacuuccacuga

SEQ ID NO: 6631 - RNA, 19 nt, artificial
  Oligomer
agugcucucaaaaccauag

SEQ ID NO: 6632 - RNA, 19 nt, artificial
  Oligomer
ucaaaaccauagagcucca

SEQ ID NO: 6633 - RNA, 19 nt, artificial
  Oligomer
caaaaccauagagcuccac

SEQ ID NO: 6634 - RNA, 19 nt, artificial
  Oligomer
uucgacagacuggcaagag

SEQ ID NO: 6635 - RNA, 19 nt, artificial
  Oligomer
caacccacauuuauuuccu

SEQ ID NO: 6636 - RNA, 19 nt, artificial
  Oligomer
cagacuggcaagagaauca

SEQ ID NO: 6637 - RNA, 19 nt, artificial
  Oligomer
aagccggcauuguuccuuu

SEQ ID NO: 6638 - RNA, 19 nt, artificial
  Oligomer
auauuuguaccagacugac

SEQ ID NO: 6639 - RNA, 19 nt, artificial
  Oligomer
uuuguaccagacugacuug

SEQ ID NO: 6640 - RNA, 19 nt, artificial
  Oligomer
gauacuaaagaagucuucc

SEQ ID NO: 6641 - RNA, 19 nt, artificial
  Oligomer
uaaagaagucuuccucagg

SEQ ID NO: 6642 - RNA, 19 nt, artificial
  Oligomer
gucaguguaaaagggugcc

SEQ ID NO: 6643 - RNA, 19 nt, artificial
  Oligomer
guguaaaagaacuuaggug

SEQ ID NO: 6644 - RNA, 19 nt, artificial
  Oligomer
uucuucuucaucuguagcu

SEQ ID NO: 6645 - RNA, 19 nt, artificial
  Oligomer
augaccaccuucuguugag

SEQ ID NO: 6646 - RNA, 19 nt, artificial
  Oligomer
accuucuguugagaucgcc

SEQ ID NO: 6647 - RNA, 19 nt, artificial
  Oligomer
gaacuuagguggaauauca

SEQ ID NO: 6648 - RNA, 19 nt, artificial
  Oligomer
agagauacagaaacauggg

SEQ ID NO: 6649 - RNA, 19 nt, artificial
  Oligomer
gauacagaaacaugggacc

SEQ ID NO: 6650 - RNA, 19 nt, artificial
  Oligomer
auauuaugcacagccaaac

SEQ ID NO: 6651 - RNA, 19 nt, artificial
  Oligomer
augaagaagaucacaaaga

SEQ ID NO: 6652 - RNA, 19 nt, artificial
  Oligomer
aagaagaucacaaagagau

SEQ ID NO: 6653 - RNA, 19 nt, artificial
  Oligomer
gaagaucacaaagagauga

SEQ ID NO: 6654 - RNA, 19 nt, artificial
  Oligomer
guguguaccaaaagacuuc

SEQ ID NO: 6655 - RNA, 19 nt, artificial
  Oligomer
gauaacuuucauuuugccu

SEQ ID NO: 6656 - RNA, 19 nt, artificial
  Oligomer
ugacaaaaauggagagccc

SEQ ID NO: 6657 - RNA, 19 nt, artificial
  Oligomer
ucaucauucuuagaguacc

SEQ ID NO: 6658 - RNA, 19 nt, artificial
  Oligomer
uugaagauagaaaaccuug

SEQ ID NO: 6659 - RNA, 19 nt, artificial
  Oligomer
accauuccacauuaaauag

SEQ ID NO: 6660 - RNA, 19 nt, artificial
  Oligomer
gaaacaauaaacagagccu

SEQ ID NO: 6661 - RNA, 19 nt, artificial
  Oligomer
aauagaugugcaauggugu

SEQ ID NO: 6662 - RNA, 19 nt, artificial
  Oligomer
ucuaagcagaaaccauccu

SEQ ID NO: 6663 - RNA, 19 nt, artificial
  Oligomer
uuugucagaccuacccuca

SEQ ID NO: 6664 - RNA, 19 nt, artificial
  Oligomer
aaaggaauaguaguaugac

SEQ ID NO: 6665 - RNA, 19 nt, artificial
  Oligomer
ugacaaagaacaacugagu

SEQ ID NO: 6666 - RNA, 19 nt, artificial
  Oligomer
caucaaaauuugugaccag

SEQ ID NO: 6667 - RNA, 19 nt, artificial
  Oligomer
aucaaaauuugugaccaga

SEQ ID NO: 6668 - RNA, 19 nt, artificial
  Oligomer
uuuccuccuaaaccagucu

SEQ ID NO: 6669 - RNA, 19 nt, artificial
  Oligomer
uucuccuucuuccucauua

SEQ ID NO: 6670 - RNA, 19 nt, artificial
  Oligomer
ucuccuucuuccucauuac

SEQ ID NO: 6671 - RNA, 19 nt, artificial
  Oligomer
uucuuccucauuaccgaag

SEQ ID NO: 6672 - RNA, 19 nt, artificial
  Oligomer
uuaccgaaguugaagaguu

SEQ ID NO: 6673 - RNA, 19 nt, artificial
  Oligomer
gugugaauuugaucucugu

SEQ ID NO: 6674 - RNA, 19 nt, artificial
  Oligomer
aaugugcagaacccuucag

SEQ ID NO: 6675 - RNA, 19 nt, artificial
  Oligomer
uuagccuguucuugacccu

SEQ ID NO: 6676 - RNA, 19 nt, artificial
  Oligomer
caagcacagugguaaauga

SEQ ID NO: 6677 - RNA, 19 nt, artificial
  Oligomer
cacagugguaaaugaugag

SEQ ID NO: 6678 - RNA, 19 nt, artificial
  Oligomer
ucaauccaauauucuucug

SEQ ID NO: 6679 - RNA, 19 nt, artificial
  Oligomer
gauuuugaggauucugagg

SEQ ID NO: 6680 - RNA, 19 nt, artificial
  Oligomer
cacaguuucauaaucuuag

SEQ ID NO: 6681 - RNA, 19 nt, artificial
  Oligomer
aaauugaguccaagaaucu

SEQ ID NO: 6682 - RNA, 19 nt, artificial
  Oligomer
uucccuaacuuccacugac

SEQ ID NO: 6683 - RNA, 19 nt, artificial
  Oligomer
uguccauuuuuaagcaggg

SEQ ID NO: 6684 - RNA, 19 nt, artificial
  Oligomer
acccacauuuauuuccuca

SEQ ID NO: 6685 - RNA, 19 nt, artificial
  Oligomer
auggaagagacaaguuaga

SEQ ID NO: 6686 - RNA, 19 nt, artificial
  Oligomer
aaguuagaaguuuuccuug

SEQ ID NO: 6687 - RNA, 19 nt, artificial
  Oligomer
aguuagaaguuuuccuugu

SEQ ID NO: 6688 - RNA, 19 nt, artificial
  Oligomer
uagaaguuuuccuuguuga

SEQ ID NO: 6689 - RNA, 19 nt, artificial
  Oligomer
gaucacaucuuucuccuca

SEQ ID NO: 6690 - RNA, 19 nt, artificial
  Oligomer
agguagauguuguagcuga

SEQ ID NO: 6691 - RNA, 19 nt, artificial
  Oligomer
cugcaaaccacucaaaggc

SEQ ID NO: 6692 - RNA, 19 nt, artificial
  Oligomer
aaaccacucaaaggcaugu

SEQ ID NO: 6693 - RNA, 19 nt, artificial
  Oligomer
auuuguaccagacugacuu

SEQ ID NO: 6694 - RNA, 19 nt, artificial
  Oligomer
agacugacuugagaaugga

SEQ ID NO: 6695 - RNA, 19 nt, artificial
  Oligomer
gagaauggaugcgaagggu

SEQ ID NO: 6696 - RNA, 19 nt, artificial
  Oligomer
aacacaucuucacuggcag

SEQ ID NO: 6697 - RNA, 19 nt, artificial
  Oligomer
auguauugucccacuucca

SEQ ID NO: 6698 - RNA, 19 nt, artificial
  Oligomer
ugucccacuuccauuuuga

SEQ ID NO: 6699 - RNA, 19 nt, artificial
  Oligomer
ccacuuccauuuugaaccc

SEQ ID NO: 6700 - RNA, 19 nt, artificial
  Oligomer
uuuugaaagggugagugac

SEQ ID NO: 6701 - RNA, 19 nt, artificial
  Oligomer
gagauacagaaacauggga

SEQ ID NO: 6702 - RNA, 19 nt, artificial
  Oligomer
uacagaaacaugggaccca

SEQ ID NO: 6703 - RNA, 19 nt, artificial
  Oligomer
uccauuuccaagucauagg

SEQ ID NO: 6704 - RNA, 19 nt, artificial
  Oligomer
ugaagaagaucacaaagag

SEQ ID NO: 6705 - RNA, 19 nt, artificial
  Oligomer
gauguguguaccaaaagac

SEQ ID NO: 6706 - RNA, 19 nt, artificial
  Oligomer
agcgugaugacaacuccag

SEQ ID NO: 6707 - RNA, 19 nt, artificial
  Oligomer
uccaaguucagagagugcu

SEQ ID NO: 6708 - RNA, 19 nt, artificial
  Oligomer
uucuuagaguaccuguuaa

SEQ ID NO: 6709 - RNA, 19 nt, artificial
  Oligomer
ucucauaacuggauaacac

SEQ ID NO: 6710 - RNA, 19 nt, artificial
  Oligomer
agaaagggccaauauucuc

SEQ ID NO: 6711 - RNA, 19 nt, artificial
  Oligomer
cucuccaguucauacuuug

SEQ ID NO: 6712 - RNA, 19 nt, artificial
  Oligomer
uuaguucauccuagucccu

SEQ ID NO: 6713 - RNA, 19 nt, artificial
  Oligomer
aguucauccuagucccuug

SEQ ID NO: 6714 - RNA, 19 nt, artificial
  Oligomer
ugugaccagauuuuaaaag

SEQ ID NO: 6715 - RNA, 19 nt, artificial
  Oligomer
gugaccagauuuuaaaaga

SEQ ID NO: 6716 - RNA, 19 nt, artificial
  Oligomer
ccuccuucaauuauauucu

SEQ ID NO: 6717 - RNA, 19 nt, artificial
  Oligomer
auuuucucucacucuccca

SEQ ID NO: 6718 - RNA, 19 nt, artificial
  Oligomer
auuaccgaaguugaagagu

SEQ ID NO: 6719 - RNA, 19 nt, artificial
  Oligomer
uaaaacugguuuuaguucc

SEQ ID NO: 6720 - RNA, 19 nt, artificial
  Oligomer
agugugaauuugaucucug

SEQ ID NO: 6721 - RNA, 19 nt, artificial
  Oligomer
aacaaaugaccauaucaga

SEQ ID NO: 6722 - RNA, 19 nt, artificial
  Oligomer
uugucacaauuccuaaguu

SEQ ID NO: 6723 - RNA, 19 nt, artificial
  Oligomer
cuuagccuguucuugaccc

SEQ ID NO: 6724 - RNA, 19 nt, artificial
  Oligomer
acagugguaaaugaugagu

SEQ ID NO: 6725 - RNA, 19 nt, artificial
  Oligomer
uccaaucaauccaauauuc

SEQ ID NO: 6726 - RNA, 19 nt, artificial
  Oligomer
agaaagaacaucuggccca

SEQ ID NO: 6727 - RNA, 19 nt, artificial
  Oligomer
uugucuucgaacucuuguu

SEQ ID NO: 6728 - RNA, 19 nt, artificial
  Oligomer
augcucagaugucaauacu

SEQ ID NO: 6729 - RNA, 19 nt, artificial
  Oligomer
aucuggaaaauuuccuuca

SEQ ID NO: 6730 - RNA, 19 nt, artificial
  Oligomer
aaugauggcaaaaaugaca

SEQ ID NO: 6731 - RNA, 19 nt, artificial
  Oligomer
ugaaccuuuugauccuuuc

SEQ ID NO: 6732 - RNA, 19 nt, artificial
  Oligomer
accuuuugauccuuucccu

SEQ ID NO: 6733 - RNA, 19 nt, artificial
  Oligomer
auccuuucccuuuugauuc

SEQ ID NO: 6734 - RNA, 19 nt, artificial
  Oligomer
uccuuucccuuuugauucu

SEQ ID NO: 6735 - RNA, 19 nt, artificial
  Oligomer
uucuaaaauugaguccaag

SEQ ID NO: 6736 - RNA, 19 nt, artificial
  Oligomer
aaaauugaguccaagaauc

SEQ ID NO: 6737 - RNA, 19 nt, artificial
  Oligomer
aagaaucuuuucccuaacu

SEQ ID NO: 6738 - RNA, 19 nt, artificial
  Oligomer
aucuuuucccuaacuucca

SEQ ID NO: 6739 - RNA, 19 nt, artificial
  Oligomer
ucuuuucccuaacuuccac

SEQ ID NO: 6740 - RNA, 19 nt, artificial
  Oligomer
uuccacugacauuacugag

SEQ ID NO: 6741 - RNA, 19 nt, artificial
  Oligomer
uguuuguaaaagugcucuc

SEQ ID NO: 6742 - RNA, 19 nt, artificial
  Oligomer
guuuguaaaagugcucuca

SEQ ID NO: 6743 - RNA, 19 nt, artificial
  Oligomer
aaaagugcucucaaaacca

SEQ ID NO: 6744 - RNA, 19 nt, artificial
  Oligomer
aaagugcucucaaaaccau

SEQ ID NO: 6745 - RNA, 19 nt, artificial
  Oligomer
gacaaguuagaaguuuucc

SEQ ID NO: 6746 - RNA, 19 nt, artificial
  Oligomer
gugaucacaucuuucuccu

SEQ ID NO: 6747 - RNA, 19 nt, artificial
  Oligomer
uuuuugagcuucagauugg

SEQ ID NO: 6748 - RNA, 19 nt, artificial
  Oligomer
caauauuuguaccagacug

SEQ ID NO: 6749 - RNA, 19 nt, artificial
  Oligomer
cugacuugagaauggaugc

SEQ ID NO: 6750 - RNA, 19 nt, artificial
  Oligomer
auagcugaacacaucuuca

SEQ ID NO: 6751 - RNA, 19 nt, artificial
  Oligomer
cuaaagaagucuuccucag

SEQ ID NO: 6752 - RNA, 19 nt, artificial
  Oligomer
agaaugacaaaaauggaga

SEQ ID NO: 6753 - RNA, 19 nt, artificial
  Oligomer
gaaugacaaaaauggagag

SEQ ID NO: 6754 - RNA, 19 nt, artificial
  Oligomer
caccuucuguugagaucgc

SEQ ID NO: 6755 - RNA, 19 nt, artificial
  Oligomer
cuuagguggaauaucauaa

SEQ ID NO: 6756 - RNA, 19 nt, artificial
  Oligomer
aggccaaugaagaagauca

SEQ ID NO: 6757 - RNA, 19 nt, artificial
  Oligomer
cacagcgugaugacaacuc

SEQ ID NO: 6758 - RNA, 19 nt, artificial
  Oligomer
gacaacuccagugaugccu

SEQ ID NO: 6759 - RNA, 19 nt, artificial
  Oligomer
gagugcuacugaauaagga

SEQ ID NO: 6760 - RNA, 19 nt, artificial
  Oligomer
caaugcuucaucauucuua

SEQ ID NO: 6761 - RNA, 19 nt, artificial
  Oligomer
caucauucuuagaguaccu

SEQ ID NO: 6762 - RNA, 19 nt, artificial
  Oligomer
gaagauagaaaaccuugga

SEQ ID NO: 6763 - RNA, 19 nt, artificial
  Oligomer
auagaugugcaauggugug

SEQ ID NO: 6764 - RNA, 19 nt, artificial
  Oligomer
gauucugggagacgaaagg

SEQ ID NO: 6765 - RNA, 19 nt, artificial
  Oligomer
guucauccuagucccuuga

SEQ ID NO: 6766 - RNA, 19 nt, artificial
  Oligomer
uuuucucucacucucccau

SEQ ID NO: 6767 - RNA, 19 nt, artificial
  Oligomer
cuccuuauuuccuuuuccu

SEQ ID NO: 6768 - RNA, 19 nt, artificial
  Oligomer
cuuauuuccuuuuccuccu

SEQ ID NO: 6769 - RNA, 19 nt, artificial
  Oligomer
cucuuggccacacuaacag

SEQ ID NO: 6770 - RNA, 19 nt, artificial
  Oligomer
uucauaagggcuagcugga

SEQ ID NO: 6771 - RNA, 19 nt, artificial
  Oligomer
ucaaauaagaaugugcaga

SEQ ID NO: 6772 - RNA, 19 nt, artificial
  Oligomer
uaguauccuuagccuguuc

SEQ ID NO: 6773 - RNA, 19 nt, artificial
  Oligomer
augaucuggaaaauuuccu

SEQ ID NO: 6774 - RNA, 19 nt, artificial
  Oligomer
gaucuggaaaauuuccuuc

SEQ ID NO: 6775 - RNA, 19 nt, artificial
  Oligomer
uccuugguuuccuucuucu

SEQ ID NO: 6776 - RNA, 19 nt, artificial
  Oligomer
uucauaaucuuagggaagu

SEQ ID NO: 6777 - RNA, 19 nt, artificial
  Oligomer
gaaccuuuugauccuuucc

SEQ ID NO: 6778 - RNA, 19 nt, artificial
  Oligomer
uaacuuccacugacauuac

SEQ ID NO: 6779 - RNA, 19 nt, artificial
  Oligomer
cuuccacugacauuacuga

SEQ ID NO: 6780 - RNA, 19 nt, artificial
  Oligomer
cacuaucaaacaaucuuug

SEQ ID NO: 6781 - RNA, 19 nt, artificial
  Oligomer
aacaaucuuugacauuccu

SEQ ID NO: 6782 - RNA, 19 nt, artificial
  Oligomer
cacaacccacauuuauuuc

SEQ ID NO: 6783 - RNA, 19 nt, artificial
  Oligomer
agacaaguuagaaguuuuc

SEQ ID NO: 6784 - RNA, 19 nt, artificial
  Oligomer
acaaagucuuuuguuucag

SEQ ID NO: 6785 - RNA, 19 nt, artificial
  Oligomer
caaagucuuuuguuucagg

SEQ ID NO: 6786 - RNA, 19 nt, artificial
  Oligomer
gugagguagauguuguagc

SEQ ID NO: 6787 - RNA, 19 nt, artificial
  Oligomer
auuguuccuuuccugcauc

SEQ ID NO: 6788 - RNA, 19 nt, artificial
  Oligomer
uugagaauggaugcgaagg

SEQ ID NO: 6789 - RNA, 19 nt, artificial
  Oligomer
uugaaacuccugcuuauca

SEQ ID NO: 6790 - RNA, 19 nt, artificial
  Oligomer
acgaugcggauauggauac

SEQ ID NO: 6791 - RNA, 19 nt, artificial
  Oligomer
acuaaagaagucuuccuca

SEQ ID NO: 6792 - RNA, 19 nt, artificial
  Oligomer
aaagaagucuuccucaggg

SEQ ID NO: 6793 - RNA, 19 nt, artificial
  Oligomer
ucaguguaaaagggugcca

SEQ ID NO: 6794 - RNA, 19 nt, artificial
  Oligomer
acuauccauuuccaaguca

SEQ ID NO: 6795 - RNA, 19 nt, artificial
  Oligomer
auccauuuccaagucauag

SEQ ID NO: 6796 - RNA, 19 nt, artificial
  Oligomer
uucauuuugccugucucca

SEQ ID NO: 6797 - RNA, 19 nt, artificial
  Oligomer
auaccagacaaagaggaag

SEQ ID NO: 6798 - RNA, 19 nt, artificial
  Oligomer
uaccagacaaagaggaaga

SEQ ID NO: 6799 - RNA, 19 nt, artificial
  Oligomer
caaguucagagagugcuac

SEQ ID NO: 6800 - RNA, 19 nt, artificial
  Oligomer
cagacaaagaggaagacgu

SEQ ID NO: 6801 - RNA, 19 nt, artificial
  Oligomer
uagaauuaucucccagguc

SEQ ID NO: 6802 - RNA, 19 nt, artificial
  Oligomer
cugcaaguauucaaauuuc

SEQ ID NO: 6803 - RNA, 19 nt, artificial
  Oligomer
ggcauucacacaccauucc

SEQ ID NO: 6804 - RNA, 19 nt, artificial
  Oligomer
cauucacacaccauuccac

SEQ ID NO: 6805 - RNA, 19 nt, artificial
  Oligomer
uagaaaaccuuggagaaac

SEQ ID NO: 6806 - RNA, 19 nt, artificial
  Oligomer
agaaaggcuauauucgcac

SEQ ID NO: 6807 - RNA, 19 nt, artificial
  Oligomer
uuauuuccuuuuccuccua

SEQ ID NO: 6808 - RNA, 19 nt, artificial
  Oligomer
uauuuccuuuuccuccuaa

SEQ ID NO: 6809 - RNA, 19 nt, artificial
  Oligomer
uuccuuuuccuccuaaacc

SEQ ID NO: 6810 - RNA, 19 nt, artificial
  Oligomer
uccuuuuccuccuaaacca

SEQ ID NO: 6811 - RNA, 19 nt, artificial
  Oligomer
guauuuacggaaaauaagg

SEQ ID NO: 6812 - RNA, 19 nt, artificial
  Oligomer
aauaagaaugugcagaacc

SEQ ID NO: 6813 - RNA, 19 nt, artificial
  Oligomer
aacaucuggcccaguuacc

SEQ ID NO: 6814 - RNA, 19 nt, artificial
  Oligomer
uuaguaaacuggaguaugc

SEQ ID NO: 6815 - RNA, 19 nt, artificial
  Oligomer
uaaugauggcaaaaaugac

SEQ ID NO: 6816 - RNA, 19 nt, artificial
  Oligomer
cuccuugguuuccuucuuc

SEQ ID NO: 6817 - RNA, 19 nt, artificial
  Oligomer
acaaguuagaaguuuuccu

SEQ ID NO: 6818 - RNA, 19 nt, artificial
  Oligomer
uccauacaaagucuuuugu

SEQ ID NO: 6819 - RNA, 19 nt, artificial
  Oligomer
ugagguagauguuguagcu

SEQ ID NO: 6820 - RNA, 19 nt, artificial
  Oligomer
ugcucccacuaacaucacc

SEQ ID NO: 6821 - RNA, 19 nt, artificial
  Oligomer
uaacaucaccaccucauag

SEQ ID NO: 6822 - RNA, 19 nt, artificial
  Oligomer
gaacacaucuucacuggca

SEQ ID NO: 6823 - RNA, 19 nt, artificial
  Oligomer
augcggauauggauacuaa

SEQ ID NO: 6824 - RNA, 19 nt, artificial
  Oligomer
gauauggauacuaaagaag

SEQ ID NO: 6825 - RNA, 19 nt, artificial
  Oligomer
ggaugucaguguaaaaggg

SEQ ID NO: 6826 - RNA, 19 nt, artificial
  Oligomer
caguguaaaagggugccac

SEQ ID NO: 6827 - RNA, 19 nt, artificial
  Oligomer
cacuauccauuuccaaguc

SEQ ID NO: 6828 - RNA, 19 nt, artificial
  Oligomer
aucauaaacccgguaauac

SEQ ID NO: 6829 - RNA, 19 nt, artificial
  Oligomer
ugacaacuccagugaugcc

SEQ ID NO: 6830 - RNA, 19 nt, artificial
  Oligomer
guaauaccagacaaagagg

SEQ ID NO: 6831 - RNA, 19 nt, artificial
  Oligomer
accagacaaagaggaagac

SEQ ID NO: 6832 - RNA, 19 nt, artificial
  Oligomer
guagaauuaucucccaggu

SEQ ID NO: 6833 - RNA, 19 nt, artificial
  Oligomer
gaauuaucucccagguccc

SEQ ID NO: 6834 - RNA, 19 nt, artificial
  Oligomer
aaagccugcaaguauucaa

SEQ ID NO: 6835 - RNA, 19 nt, artificial
  Oligomer
ucauucuuagaguaccugu

SEQ ID NO: 6836 - RNA, 19 nt, artificial
  Oligomer
gcuugagagauaaaaagga

SEQ ID NO: 6837 - RNA, 19 nt, artificial
  Oligomer
cuugagagauaaaaaggaa

SEQ ID NO: 6838 - RNA, 19 nt, artificial
  Oligomer
ugagagauaaaaaggaaac

SEQ ID NO: 6839 - RNA, 19 nt, artificial
  Oligomer
aaaggcuauauucgcacag

SEQ ID NO: 6840 - RNA, 19 nt, artificial
  Oligomer
ccuuauuuccuuuuccucc

SEQ ID NO: 6841 - RNA, 19 nt, artificial
  Oligomer
aaaacugguuuuaguuccc

SEQ ID NO: 6842 - RNA, 19 nt, artificial
  Oligomer
auucuccaccuccaacccu

SEQ ID NO: 6843 - RNA, 19 nt, artificial
  Oligomer
uaagaaugugcagaacccu

SEQ ID NO: 6844 - RNA, 19 nt, artificial
  Oligomer
agaacccuucaggcaaucc

SEQ ID NO: 6845 - RNA, 19 nt, artificial
  Oligomer
auccuuagccuguucuuga

SEQ ID NO: 6846 - RNA, 19 nt, artificial
  Oligomer
uccuuagccuguucuugac

SEQ ID NO: 6847 - RNA, 19 nt, artificial
  Oligomer
agccuguucuugacccuag

SEQ ID NO: 6848 - RNA, 19 nt, artificial
  Oligomer
gaaagaacaucuggcccag

SEQ ID NO: 6849 - RNA, 19 nt, artificial
  Oligomer
cuguauuaguaaacuggag

SEQ ID NO: 6850 - RNA, 19 nt, artificial
  Oligomer
cucaacauguauuaugucc

SEQ ID NO: 6851 - RNA, 19 nt, artificial
  Oligomer
aaugaucuggaaaauuucc

SEQ ID NO: 6852 - RNA, 19 nt, artificial
  Oligomer
caaaaaugacacaaaguag

SEQ ID NO: 6853 - RNA, 19 nt, artificial
  Oligomer
aacuuccacugacauuacu

SEQ ID NO: 6854 - RNA, 19 nt, artificial
  Oligomer
ucuuugacauuccuuuaag

SEQ ID NO: 6855 - RNA, 19 nt, artificial
  Oligomer
uuucagccaaggcuucagg

SEQ ID NO: 6856 - RNA, 19 nt, artificial
  Oligomer
auuaggguguugacuugca

SEQ ID NO: 6857 - RNA, 19 nt, artificial
  Oligomer
guccauacaaagucuuuug

SEQ ID NO: 6858 - RNA, 19 nt, artificial
  Oligomer
agugagguagauguuguag

SEQ ID NO: 6859 - RNA, 19 nt, artificial
  Oligomer
gcauuccuuuauuuuuccc

SEQ ID NO: 6860 - RNA, 19 nt, artificial
  Oligomer
uacaauucguucagcucca

SEQ ID NO: 6861 - RNA, 19 nt, artificial
  Oligomer
agauagaaaaccuuggaga

SEQ ID NO: 6862 - RNA, 19 nt, artificial
  Oligomer
aaggcuauauucgcacagc

SEQ ID NO: 6863 - RNA, 19 nt, artificial
  Oligomer
uccuccuaaaccagucuuc

SEQ ID NO: 6864 - RNA, 19 nt, artificial
  Oligomer
auaagggcuagcuggagaa

SEQ ID NO: 6865 - RNA, 19 nt, artificial
  Oligomer
uuauagcacaaggagcagg

SEQ ID NO: 6866 - RNA, 19 nt, artificial
  Oligomer
cuucaggcaauccuauugg

SEQ ID NO: 6867 - RNA, 19 nt, artificial
  Oligomer
aguauccuuagccuguucu

SEQ ID NO: 6868 - RNA, 19 nt, artificial
  Oligomer
uguauuaguaaacuggagu

SEQ ID NO: 6869 - RNA, 19 nt, artificial
  Oligomer
auuauguccuaaugaucug

SEQ ID NO: 6870 - RNA, 19 nt, artificial
  Oligomer
ugaucuggaaaauuuccuu

SEQ ID NO: 6871 - RNA, 19 nt, artificial
  Oligomer
caaacaaucuuugacauuc

SEQ ID NO: 6872 - RNA, 19 nt, artificial
  Oligomer
gaagagacaaguuagaagu

SEQ ID NO: 6873 - RNA, 19 nt, artificial
  Oligomer
caaguuagaaguuuuccuu

SEQ ID NO: 6874 - RNA, 19 nt, artificial
  Oligomer
ugcacagcaaagugauugg

SEQ ID NO: 6875 - RNA, 19 nt, artificial
  Oligomer
cucccacuaacaucaccac

SEQ ID NO: 6876 - RNA, 19 nt, artificial
  Oligomer
acagaaacaugggacccac

SEQ ID NO: 6877 - RNA, 19 nt, artificial
  Oligomer
aacccgguaauaccagaca

SEQ ID NO: 6878 - RNA, 19 nt, artificial
  Oligomer
auaacuggauaacacaggg

SEQ ID NO: 6879 - RNA, 19 nt, artificial
  Oligomer
uaacuggauaacacagggc

SEQ ID NO: 6880 - RNA, 19 nt, artificial
  Oligomer
uuccuccuaaaccagucuu

SEQ ID NO: 6881 - RNA, 19 nt, artificial
  Oligomer
agcucuuucuccuucuucc

SEQ ID NO: 6882 - RNA, 19 nt, artificial
  Oligomer
uuaggaugaugaugaugau

SEQ ID NO: 6883 - RNA, 19 nt, artificial
  Oligomer
uuaguauccuuagccuguu

SEQ ID NO: 6884 - RNA, 19 nt, artificial
  Oligomer
ugcuguauuaguaaacugg

SEQ ID NO: 6885 - RNA, 19 nt, artificial
  Oligomer
uauguccuaaugaucugga

SEQ ID NO: 6886 - RNA, 19 nt, artificial
  Oligomer
ugauggcaaaaaugacaca

SEQ ID NO: 6887 - RNA, 19 nt, artificial
  Oligomer
acugagaggaaaaaaauga

SEQ ID NO: 6888 - RNA, 19 nt, artificial
  Oligomer
augcuuuguuuacucaggg

SEQ ID NO: 6889 - RNA, 19 nt, artificial
  Oligomer
ucaaaggcauguguguccc

SEQ ID NO: 6890 - RNA, 19 nt, artificial
  Oligomer
uuguaccagacugacuuga

SEQ ID NO: 6891 - RNA, 19 nt, artificial
  Oligomer
aucuuagguaguuuccacg

SEQ ID NO: 6892 - RNA, 19 nt, artificial
  Oligomer
aucacagccacaagcauug

SEQ ID NO: 6893 - RNA, 19 nt, artificial
  Oligomer
uucaucuguagcucgaugg

SEQ ID NO: 6894 - RNA, 19 nt, artificial
  Oligomer
guacaauucguucagcucc

SEQ ID NO: 6895 - RNA, 19 nt, artificial
  Oligomer
aauugcaaaagcagaagaa

SEQ ID NO: 6896 - RNA, 19 nt, artificial
  Oligomer
auuagucacacagaugcga

SEQ ID NO: 6897 - RNA, 19 nt, artificial
  Oligomer
aagaccacuuugggcagga

SEQ ID NO: 6898 - RNA, 19 nt, artificial
  Oligomer
uugggcaggaaauuagucu

SEQ ID NO: 6899 - RNA, 19 nt, artificial
  Oligomer
uuuauagcacaaggagcag

SEQ ID NO: 6900 - RNA, 19 nt, artificial
  Oligomer
uauagcacaaggagcagga

SEQ ID NO: 6901 - RNA, 19 nt, artificial
  Oligomer
uauucugguauuagggugu

SEQ ID NO: 6902 - RNA, 19 nt, artificial
  Oligomer
cuccuuauaacugagguac

SEQ ID NO: 6903 - RNA, 19 nt, artificial
  Oligomer
uaacugagguacccucucc

SEQ ID NO: 6904 - RNA, 19 nt, artificial
  Oligomer
acaaagaggaagacguuca

SEQ ID NO: 6905 - RNA, 19 nt, artificial
  Oligomer
aucaguauguguauaccuc

SEQ ID NO: 6906 - RNA, 19 nt, artificial
  Oligomer
auuuagagacucucucuug

SEQ ID NO: 6907 - RNA, 19 nt, artificial
  Oligomer
uuuagagacucucucuuga

SEQ ID NO: 6908 - RNA, 19 nt, artificial
  Oligomer
uaaacuggaguaugcucag

SEQ ID NO: 6909 - RNA, 19 nt, artificial
  Oligomer
uuuacucaggguuucagcc

SEQ ID NO: 6910 - RNA, 19 nt, artificial
  Oligomer
uacucaggguuucagccaa

SEQ ID NO: 6911 - RNA, 19 nt, artificial
  Oligomer
ucauuaucccaguugggcc

SEQ ID NO: 6912 - RNA, 19 nt, artificial
  Oligomer
auggaugcgaaggguguga

SEQ ID NO: 6913 - RNA, 19 nt, artificial
  Oligomer
uaucuuagguaguuuccac

SEQ ID NO: 6914 - RNA, 19 nt, artificial
  Oligomer
ugacaaaaauguauugucc

SEQ ID NO: 6915 - RNA, 19 nt, artificial
  Oligomer
aagaucacaaagagaugau

SEQ ID NO: 6916 - RNA, 19 nt, artificial
  Oligomer
aaagggccaauauucucag

SEQ ID NO: 6917 - RNA, 19 nt, artificial
  Oligomer
cauuagucacacagaugcg

SEQ ID NO: 6918 - RNA, 19 nt, artificial
  Oligomer
uccuguccaguugucuucg

SEQ ID NO: 6919 - RNA, 19 nt, artificial
  Oligomer
ucaacauguauuauguccu

SEQ ID NO: 6920 - RNA, 19 nt, artificial
  Oligomer
uauuguggaaagaguauca

SEQ ID NO: 6921 - RNA, 19 nt, artificial
  Oligomer
guuucagccaaggcuucag

SEQ ID NO: 6922 - RNA, 19 nt, artificial
  Oligomer
uucauuaucccaguugggc

SEQ ID NO: 6923 - RNA, 19 nt, artificial
  Oligomer
caguugaaauucaggcagg

SEQ ID NO: 6924 - RNA, 19 nt, artificial
  Oligomer
auugcaauauuuguaccag

SEQ ID NO: 6925 - RNA, 19 nt, artificial
  Oligomer
ucuuagguaguuuccacgc

SEQ ID NO: 6926 - RNA, 19 nt, artificial
  Oligomer
uuggugaugaccaccuucu

SEQ ID NO: 6927 - RNA, 19 nt, artificial
  Oligomer
ucugcccacguacaauucg

SEQ ID NO: 6928 - RNA, 19 nt, artificial
  Oligomer
cugcccacguacaauucgu

SEQ ID NO: 6929 - RNA, 19 nt, artificial
  Oligomer
acguacaauucguucagcu

SEQ ID NO: 6930 - RNA, 19 nt, artificial
  Oligomer
gaucagaauuauugacucg

SEQ ID NO: 6931 - RNA, 19 nt, artificial
  Oligomer
acaauugcaaaagcagaag

SEQ ID NO: 6932 - RNA, 19 nt, artificial
  Oligomer
aacagagccugacucauag

SEQ ID NO: 6933 - RNA, 19 nt, artificial
  Oligomer
cagaaaggcuauauucgca

SEQ ID NO: 6934 - RNA, 19 nt, artificial
  Oligomer
ucaguauguguauaccucc

SEQ ID NO: 6935 - RNA, 19 nt, artificial
  Oligomer
uuuuaguucccagaaaugg

SEQ ID NO: 6936 - RNA, 19 nt, artificial
  Oligomer
gagaagaccacuuugggca

SEQ ID NO: 6937 - RNA, 19 nt, artificial
  Oligomer
uuuuauagcacaaggagca

SEQ ID NO: 6938 - RNA, 19 nt, artificial
  Oligomer
agaugagccagagucaugg

SEQ ID NO: 6939 - RNA, 19 nt, artificial
  Oligomer
uucaggcaauccuauuggu

SEQ ID NO: 6940 - RNA, 19 nt, artificial
  Oligomer
uguagaaagaacaucuggc

SEQ ID NO: 6941 - RNA, 19 nt, artificial
  Oligomer
aacuggaguaugcucagau

SEQ ID NO: 6942 - RNA, 19 nt, artificial
  Oligomer
aggaaggacagcagauuuc

SEQ ID NO: 6943 - RNA, 19 nt, artificial
  Oligomer
uuaagggaaaaccauuaca

SEQ ID NO: 6944 - RNA, 19 nt, artificial
  Oligomer
uuacucaggguuucagcca

SEQ ID NO: 6945 - RNA, 19 nt, artificial
  Oligomer
guauuaggguguugacuug

SEQ ID NO: 6946 - RNA, 19 nt, artificial
  Oligomer
auucauuaucccaguuggg

SEQ ID NO: 6947 - RNA, 19 nt, artificial
  Oligomer
auuaucccaguugggccgu

SEQ ID NO: 6948 - RNA, 19 nt, artificial
  Oligomer
gugcacagcaaagugauug

SEQ ID NO: 6949 - RNA, 19 nt, artificial
  Oligomer
aaauucaggcaggcugcag

SEQ ID NO: 6950 - RNA, 19 nt, artificial
  Oligomer
cuuagguaguuuccacgca

SEQ ID NO: 6951 - RNA, 19 nt, artificial
  Oligomer
uguagcucgaugguuuuga

SEQ ID NO: 6952 - RNA, 19 nt, artificial
  Oligomer
aggguuuccagcaaacuga

SEQ ID NO: 6953 - RNA, 19 nt, artificial
  Oligomer
uuuauucucuuucgagcaa

SEQ ID NO: 6954 - RNA, 19 nt, artificial
  Oligomer
aacuggauaacacagggca

SEQ ID NO: 6955 - RNA, 19 nt, artificial
  Oligomer
agcugguuuuaauuaugca

SEQ ID NO: 6956 - RNA, 19 nt, artificial
  Oligomer
acauagguuagaaagggcc

SEQ ID NO: 6957 - RNA, 19 nt, artificial
  Oligomer
acuuugguguaaagaauug

SEQ ID NO: 6958 - RNA, 19 nt, artificial
  Oligomer
ucagcaucaaaauuuguga

SEQ ID NO: 6959 - RNA, 19 nt, artificial
  Oligomer
cagggaaugaccaauauga

SEQ ID NO: 6960 - RNA, 19 nt, artificial
  Oligomer
uuuaguucccagaaauggg

SEQ ID NO: 6961 - RNA, 19 nt, artificial
  Oligomer
aaugggagcaguucuaaga

SEQ ID NO: 6962 - RNA, 19 nt, artificial
  Oligomer
uagagauuuuuguuucugg

SEQ ID NO: 6963 - RNA, 19 nt, artificial
  Oligomer
ucagauacauauuugucac

SEQ ID NO: 6964 - RNA, 19 nt, artificial
  Oligomer
accauuuuaugaaagguga

SEQ ID NO: 6965 - RNA, 19 nt, artificial
  Oligomer
uaugaaaggugagauuccu

SEQ ID NO: 6966 - RNA, 19 nt, artificial
  Oligomer
auccuauugguuaguaucc

SEQ ID NO: 6967 - RNA, 19 nt, artificial
  Oligomer
aaaacuuacuugaguaucc

SEQ ID NO: 6968 - RNA, 19 nt, artificial
  Oligomer
guaaacuggaguaugcuca

SEQ ID NO: 6969 - RNA, 19 nt, artificial
  Oligomer
uaaguguugagacacucuc

SEQ ID NO: 6970 - RNA, 19 nt, artificial
  Oligomer
auguccuaaugaucuggaa

SEQ ID NO: 6971 - RNA, 19 nt, artificial
  Oligomer
aucuuagggaaguuacuga

SEQ ID NO: 6972 - RNA, 19 nt, artificial
  Oligomer
cugagaggaaaaaaaugaa

SEQ ID NO: 6973 - RNA, 19 nt, artificial
  Oligomer
gacucagaguuggagaugc

SEQ ID NO: 6974 - RNA, 19 nt, artificial
  Oligomer
aaaacuccuauucugguau

SEQ ID NO: 6975 - RNA, 19 nt, artificial
  Oligomer
aacuccuauucugguauua

SEQ ID NO: 6976 - RNA, 19 nt, artificial
  Oligomer
uucuccucaucauggugca

SEQ ID NO: 6977 - RNA, 19 nt, artificial
  Oligomer
acagcaaagugauuggccu

SEQ ID NO: 6978 - RNA, 19 nt, artificial
  Oligomer
aucaaccgcuaucuuaggu

SEQ ID NO: 6979 - RNA, 19 nt, artificial
  Oligomer
caaccgcuaucuuagguag

SEQ ID NO: 6980 - RNA, 19 nt, artificial
  Oligomer
ugaaacuccugcuuaucac

SEQ ID NO: 6981 - RNA, 19 nt, artificial
  Oligomer
aaacuccugcuuaucacag

SEQ ID NO: 6982 - RNA, 19 nt, artificial
  Oligomer
uaaaagggugccacuccag

SEQ ID NO: 6983 - RNA, 19 nt, artificial
  Oligomer
uuuccagcaaacugaggga

SEQ ID NO: 6984 - RNA, 19 nt, artificial
  Oligomer
accuccggaugguuuuggu

SEQ ID NO: 6985 - RNA, 19 nt, artificial
  Oligomer
gagauaacuuucauuuugc

SEQ ID NO: 6986 - RNA, 19 nt, artificial
  Oligomer
ucagacuccuuauaacuga

SEQ ID NO: 6987 - RNA, 19 nt, artificial
  Oligomer
agacuccuuauaacugagg

SEQ ID NO: 6988 - RNA, 19 nt, artificial
  Oligomer
uucauacuuugguguaaag

SEQ ID NO: 6989 - RNA, 19 nt, artificial
  Oligomer
caacugaguucuuauuuag

SEQ ID NO: 6990 - RNA, 19 nt, artificial
  Oligomer
aaacaacaucaguaugugu

SEQ ID NO: 6991 - RNA, 19 nt, artificial
  Oligomer
aacaucaguauguguauac

SEQ ID NO: 6992 - RNA, 19 nt, artificial
  Oligomer
uuaguucccagaaauggga

SEQ ID NO: 6993 - RNA, 19 nt, artificial
  Oligomer
gggcaggaaauuagucugc

SEQ ID NO: 6994 - RNA, 19 nt, artificial
  Oligomer
augagccagagucauggca

SEQ ID NO: 6995 - RNA, 19 nt, artificial
  Oligomer
cauggcaggagguuaauuc

SEQ ID NO: 6996 - RNA, 19 nt, artificial
  Oligomer
aaggugagauuccugucca

SEQ ID NO: 6997 - RNA, 19 nt, artificial
  Oligomer
uuccuuuggucuaugacag

SEQ ID NO: 6998 - RNA, 19 nt, artificial
  Oligomer
aaacuuacuugaguauccg

SEQ ID NO: 6999 - RNA, 19 nt, artificial
  Oligomer
ugaguauuacauuaacucc

SEQ ID NO: 7000 - RNA, 19 nt, artificial
  Oligomer
uaguaaacuggaguaugcu

SEQ ID NO: 7001 - RNA, 19 nt, artificial
  Oligomer
ucuggaaaauuuccuucag

SEQ ID NO: 7002 - RNA, 19 nt, artificial
  Oligomer
guuuccuucuucuuuuggg

SEQ ID NO: 7003 - RNA, 19 nt, artificial
  Oligomer
uucugaggcagcucaguau

SEQ ID NO: 7004 - RNA, 19 nt, artificial
  Oligomer
aaccuggaguaagaugggc

SEQ ID NO: 7005 - RNA, 19 nt, artificial
  Oligomer
ugauucuaaaauugagucc

SEQ ID NO: 7006 - RNA, 19 nt, artificial
  Oligomer
uaagggaaaaccauuacau

SEQ ID NO: 7007 - RNA, 19 nt, artificial
  Oligomer
cuauucugguauuagggug

SEQ ID NO: 7008 - RNA, 19 nt, artificial
  Oligomer
auucugguauuaggguguu

SEQ ID NO: 7009 - RNA, 19 nt, artificial
  Oligomer
auggugcacagcaaaguga

SEQ ID NO: 7010 - RNA, 19 nt, artificial
  Oligomer
cuuuccugcaucuggcucu

SEQ ID NO: 7011 - RNA, 19 nt, artificial
  Oligomer
uuuccugcaucuggcucuc

SEQ ID NO: 7012 - RNA, 19 nt, artificial
  Oligomer
auaggaggguuuccagcaa

SEQ ID NO: 7013 - RNA, 19 nt, artificial
  Oligomer
guuuccagcaaacugaggg

SEQ ID NO: 7014 - RNA, 19 nt, artificial
  Oligomer
auugggcauuccuuuauuu

SEQ ID NO: 7015 - RNA, 19 nt, artificial
  Oligomer
aaacccgguaauaccagac

SEQ ID NO: 7016 - RNA, 19 nt, artificial
  Oligomer
aguaagaccuccggauggu

SEQ ID NO: 7017 - RNA, 19 nt, artificial
  Oligomer
aaacacaauugcaaaagca

SEQ ID NO: 7018 - RNA, 19 nt, artificial
  Oligomer
cuuggagaaacacucucgg

SEQ ID NO: 7019 - RNA, 19 nt, artificial
  Oligomer
auagguuagaaagggccaa

SEQ ID NO: 7020 - RNA, 19 nt, artificial
  Oligomer
aagggccaauauucucaga

SEQ ID NO: 7021 - RNA, 19 nt, artificial
  Oligomer
gacuccuuauaacugaggu

SEQ ID NO: 7022 - RNA, 19 nt, artificial
  Oligomer
ccacauuaaauagaugugc

SEQ ID NO: 7023 - RNA, 19 nt, artificial
  Oligomer
agcaggccuuauuugucag

SEQ ID NO: 7024 - RNA, 19 nt, artificial
  Oligomer
cugaguucuuauuuaguuc

SEQ ID NO: 7025 - RNA, 19 nt, artificial
  Oligomer
aaaacaacaucaguaugug

SEQ ID NO: 7026 - RNA, 19 nt, artificial
  Oligomer
caguauguguauaccuccu

SEQ ID NO: 7027 - RNA, 19 nt, artificial
  Oligomer
agaaaacccugcucuuggc

SEQ ID NO: 7028 - RNA, 19 nt, artificial
  Oligomer
caccauuuuaugaaaggug

SEQ ID NO: 7029 - RNA, 19 nt, artificial
  Oligomer
cauuuuaugaaaggugaga

SEQ ID NO: 7030 - RNA, 19 nt, artificial
  Oligomer
ugggcaggaaauuagucug

SEQ ID NO: 7031 - RNA, 19 nt, artificial
  Oligomer
caggagguuaauucuccac

SEQ ID NO: 7032 - RNA, 19 nt, artificial
  Oligomer
auugguuaguauccuuagc

SEQ ID NO: 7033 - RNA, 19 nt, artificial
  Oligomer
gaguauuacauuaacucca

SEQ ID NO: 7034 - RNA, 19 nt, artificial
  Oligomer
cugcuguauuaguaaacug

SEQ ID NO: 7035 - RNA, 19 nt, artificial
  Oligomer
aaacuggaguaugcucaga

SEQ ID NO: 7036 - RNA, 19 nt, artificial
  Oligomer
ugcuuuguuuacucagggu

SEQ ID NO: 7037 - RNA, 19 nt, artificial
  Oligomer
aaagucuuuuguuucaggc

SEQ ID NO: 7038 - RNA, 19 nt, artificial
  Oligomer
aguugaaauucaggcaggc

SEQ ID NO: 7039 - RNA, 19 nt, artificial
  Oligomer
uuuugagcuucagauuggu

SEQ ID NO: 7040 - RNA, 19 nt, artificial
  Oligomer
cacaagcauugaacagccc

SEQ ID NO: 7041 - RNA, 19 nt, artificial
  Oligomer
cucgaugguuuugaaaggg

SEQ ID NO: 7042 - RNA, 19 nt, artificial
  Oligomer
aacaugggacccacuaucc

SEQ ID NO: 7043 - RNA, 19 nt, artificial
  Oligomer
cuguuauauuaugcacagc

SEQ ID NO: 7044 - RNA, 19 nt, artificial
  Oligomer
aauaugaggcacagcguga

SEQ ID NO: 7045 - RNA, 19 nt, artificial
  Oligomer
uuauaacugagguacccuc

SEQ ID NO: 7046 - RNA, 19 nt, artificial
  Oligomer
acaggcuggaccuaagugu

SEQ ID NO: 7047 - RNA, 19 nt, artificial
  Oligomer
cagcaggccuuauuuguca

SEQ ID NO: 7048 - RNA, 19 nt, artificial
  Oligomer
caggccuuauuugucagac

SEQ ID NO: 7049 - RNA, 19 nt, artificial
  Oligomer
cagcaucaaaauuugugac

SEQ ID NO: 7050 - RNA, 19 nt, artificial
  Oligomer
gagugaagugcaaucaucc

SEQ ID NO: 7051 - RNA, 19 nt, artificial
  Oligomer
gaagugcaaucauccaugc

SEQ ID NO: 7052 - RNA, 19 nt, artificial
  Oligomer
aaacugguuuuaguuccca

SEQ ID NO: 7053 - RNA, 19 nt, artificial
  Oligomer
aaaacccugcucuuggcca

SEQ ID NO: 7054 - RNA, 19 nt, artificial
  Oligomer
uugagugugaauuugaucu

SEQ ID NO: 7055 - RNA, 19 nt, artificial
  Oligomer
ccauuagucacacagaugc

SEQ ID NO: 7056 - RNA, 19 nt, artificial
  Oligomer
uuuuguguguguauuuacg

SEQ ID NO: 7057 - RNA, 19 nt, artificial
  Oligomer
uuuguguguguauuuacgg

SEQ ID NO: 7058 - RNA, 19 nt, artificial
  Oligomer
cuggagaagaccacuuugg

SEQ ID NO: 7059 - RNA, 19 nt, artificial
  Oligomer
augaaaggugagauuccug

SEQ ID NO: 7060 - RNA, 19 nt, artificial
  Oligomer
gaacccuucaggcaauccu

SEQ ID NO: 7061 - RNA, 19 nt, artificial
  Oligomer
uugguuaguauccuuagcc

SEQ ID NO: 7062 - RNA, 19 nt, artificial
  Oligomer
uggucuaugacaguaauag

SEQ ID NO: 7063 - RNA, 19 nt, artificial
  Oligomer
uucuucuguagaaagaaca

SEQ ID NO: 7064 - RNA, 19 nt, artificial
  Oligomer
uucuguagaaagaacaucu

SEQ ID NO: 7065 - RNA, 19 nt, artificial
  Oligomer
auaaguguugagacacucu

SEQ ID NO: 7066 - RNA, 19 nt, artificial
  Oligomer
uucgaacucuuguugagca

SEQ ID NO: 7067 - RNA, 19 nt, artificial
  Oligomer
uuagggaaguuacugaacc

SEQ ID NO: 7068 - RNA, 19 nt, artificial
  Oligomer
uuauuugagcauuuggcag

SEQ ID NO: 7069 - RNA, 19 nt, artificial
  Oligomer
uuugagcauuuggcagcac

SEQ ID NO: 7070 - RNA, 19 nt, artificial
  Oligomer
uauuuccucauggaagaga

SEQ ID NO: 7071 - RNA, 19 nt, artificial
  Oligomer
gagaugcuuuguuuacuca

SEQ ID NO: 7072 - RNA, 19 nt, artificial
  Oligomer
cagaggaaaacuccuauuc

SEQ ID NO: 7073 - RNA, 19 nt, artificial
  Oligomer
uccuauucugguauuaggg

SEQ ID NO: 7074 - RNA, 19 nt, artificial
  Oligomer
agaaucagcaugcaguuga

SEQ ID NO: 7075 - RNA, 19 nt, artificial
  Oligomer
accagaaugacaaaaaugg

SEQ ID NO: 7076 - RNA, 19 nt, artificial
  Oligomer
cacagcaaagugauuggcc

SEQ ID NO: 7077 - RNA, 19 nt, artificial
  Oligomer
ugcaguugaaauucaggca

SEQ ID NO: 7078 - RNA, 19 nt, artificial
  Oligomer
uugaaauucaggcaggcug

SEQ ID NO: 7079 - RNA, 19 nt, artificial
  Oligomer
aacuccugcuuaucacagc

SEQ ID NO: 7080 - RNA, 19 nt, artificial
  Oligomer
cuccugcuuaucacagcca

SEQ ID NO: 7081 - RNA, 19 nt, artificial
  Oligomer
uccugcuuaucacagccac

SEQ ID NO: 7082 - RNA, 19 nt, artificial
  Oligomer
gacaaaaauguauuguccc

SEQ ID NO: 7083 - RNA, 19 nt, artificial
  Oligomer
aagucauaggaggguuucc

SEQ ID NO: 7084 - RNA, 19 nt, artificial
  Oligomer
acuguuauauuaugcacag

SEQ ID NO: 7085 - RNA, 19 nt, artificial
  Oligomer
auaaacccgguaauaccag

SEQ ID NO: 7086 - RNA, 19 nt, artificial
  Oligomer
augaggcacagcgugauga

SEQ ID NO: 7087 - RNA, 19 nt, artificial
  Oligomer
uucuuuauucucuuucgag

SEQ ID NO: 7088 - RNA, 19 nt, artificial
  Oligomer
aagaaaaaccuucauaguc

SEQ ID NO: 7089 - RNA, 19 nt, artificial
  Oligomer
gaaagggccaauauucuca

SEQ ID NO: 7090 - RNA, 19 nt, artificial
  Oligomer
aacugagguacccucucca

SEQ ID NO: 7091 - RNA, 19 nt, artificial
  Oligomer
acaauaaacagagccugac

SEQ ID NO: 7092 - RNA, 19 nt, artificial
  Oligomer
auugauaccugaggugcag

SEQ ID NO: 7093 - RNA, 19 nt, artificial
  Oligomer
aauggugugaaucgcagag

SEQ ID NO: 7094 - RNA, 19 nt, artificial
  Oligomer
acaaagaacaacugaguuc

SEQ ID NO: 7095 - RNA, 19 nt, artificial
  Oligomer
ggaaugaccaauaugagac

SEQ ID NO: 7096 - RNA, 19 nt, artificial
  Oligomer
cacacuaacagugauuuag

SEQ ID NO: 7097 - RNA, 19 nt, artificial
  Oligomer
aacauacuauugaguguga

SEQ ID NO: 7098 - RNA, 19 nt, artificial
  Oligomer
augcgauccauuuugugug

SEQ ID NO: 7099 - RNA, 19 nt, artificial
  Oligomer
cuagggagaaucagauucc

SEQ ID NO: 7100 - RNA, 19 nt, artificial
  Oligomer
gagaaucagauuccuuugg

SEQ ID NO: 7101 - RNA, 19 nt, artificial
  Oligomer
cugucacuaauaaguguug

SEQ ID NO: 7102 - RNA, 19 nt, artificial
  Oligomer
ugucacuaauaaguguuga

SEQ ID NO: 7103 - RNA, 19 nt, artificial
  Oligomer
aacucuuguugagcagcac

SEQ ID NO: 7104 - RNA, 19 nt, artificial
  Oligomer
aaaccuggaguaagauggg

SEQ ID NO: 7105 - RNA, 19 nt, artificial
  Oligomer
cuuuaagggaaaaccauua

SEQ ID NO: 7106 - RNA, 19 nt, artificial
  Oligomer
cuccuauucugguauuagg

SEQ ID NO: 7107 - RNA, 19 nt, artificial
  Oligomer
uuaggguguugacuugcaa

SEQ ID NO: 7108 - RNA, 19 nt, artificial
  Oligomer
gcacagcaaagugauuggc

SEQ ID NO: 7109 - RNA, 19 nt, artificial
  Oligomer
agcaaagugauuggccuga

SEQ ID NO: 7110 - RNA, 19 nt, artificial
  Oligomer
acuccugcuuaucacagcc

SEQ ID NO: 7111 - RNA, 19 nt, artificial
  Oligomer
uuggacaccuuugggcacu

SEQ ID NO: 7112 - RNA, 19 nt, artificial
  Oligomer
auuuccaagucauaggagg

SEQ ID NO: 7113 - RNA, 19 nt, artificial
  Oligomer
uuccaagucauaggagggu

SEQ ID NO: 7114 - RNA, 19 nt, artificial
  Oligomer
uaaacccgguaauaccaga

SEQ ID NO: 7115 - RNA, 19 nt, artificial
  Oligomer
auaugaggcacagcgugau

SEQ ID NO: 7116 - RNA, 19 nt, artificial
  Oligomer
uuucgagcaaaauugagau

SEQ ID NO: 7117 - RNA, 19 nt, artificial
  Oligomer
uacugaauaaggaucagaa

SEQ ID NO: 7118 - RNA, 19 nt, artificial
  Oligomer
aacacaauugcaaaagcag

SEQ ID NO: 7119 - RNA, 19 nt, artificial
  Oligomer
gaacuaagaaaaaccuuca

SEQ ID NO: 7120 - RNA, 19 nt, artificial
  Oligomer
cauaacuggauaacacagg

SEQ ID NO: 7121 - RNA, 19 nt, artificial
  Oligomer
gagcaacaaaugaagcugg

SEQ ID NO: 7122 - RNA, 19 nt, artificial
  Oligomer
uccacauuaaauagaugug

SEQ ID NO: 7123 - RNA, 19 nt, artificial
  Oligomer
ccuuauaacugagguaccc

SEQ ID NO: 7124 - RNA, 19 nt, artificial
  Oligomer
auaacugagguacccucuc

SEQ ID NO: 7125 - RNA, 19 nt, artificial
  Oligomer
ugaauugauaccugaggug

SEQ ID NO: 7126 - RNA, 19 nt, artificial
  Oligomer
gaauugauaccugaggugc

SEQ ID NO: 7127 - RNA, 19 nt, artificial
  Oligomer
uaccugaggugcaguguga

SEQ ID NO: 7128 - RNA, 19 nt, artificial
  Oligomer
auggugugaaucgcagagu

SEQ ID NO: 7129 - RNA, 19 nt, artificial
  Oligomer
caaagaacaacugaguucu

SEQ ID NO: 7130 - RNA, 19 nt, artificial
  Oligomer
agcaucaaaauuugugacc

SEQ ID NO: 7131 - RNA, 19 nt, artificial
  Oligomer
aacugguuuuaguucccag

SEQ ID NO: 7132 - RNA, 19 nt, artificial
  Oligomer
aagugcaaucauccaugcc

SEQ ID NO: 7133 - RNA, 19 nt, artificial
  Oligomer
gugauuuagagacucucuc

SEQ ID NO: 7134 - RNA, 19 nt, artificial
  Oligomer
cucuugaacauauauucag

SEQ ID NO: 7135 - RNA, 19 nt, artificial
  Oligomer
agaacauacuauugagugu

SEQ ID NO: 7136 - RNA, 19 nt, artificial
  Oligomer
auuugaucucuguauagag

SEQ ID NO: 7137 - RNA, 19 nt, artificial
  Oligomer
cuggguuguuaauuuuagg

SEQ ID NO: 7138 - RNA, 19 nt, artificial
  Oligomer
agucacacagaugcgaucc

SEQ ID NO: 7139 - RNA, 19 nt, artificial
  Oligomer
uuguguguguauuuacgga

SEQ ID NO: 7140 - RNA, 19 nt, artificial
  Oligomer
aggagguuaauucuccacc

SEQ ID NO: 7141 - RNA, 19 nt, artificial
  Oligomer
gcuucaaauaagaaugugc

SEQ ID NO: 7142 - RNA, 19 nt, artificial
  Oligomer
agauuccuguccaguuguc

SEQ ID NO: 7143 - RNA, 19 nt, artificial
  Oligomer
ugugguucuaaauucauuc

SEQ ID NO: 7144 - RNA, 19 nt, artificial
  Oligomer
uacuugaguauccgcucuc

SEQ ID NO: 7145 - RNA, 19 nt, artificial
  Oligomer
uagaaagaacaucuggccc

SEQ ID NO: 7146 - RNA, 19 nt, artificial
  Oligomer
cagaugucaauacugucac

SEQ ID NO: 7147 - RNA, 19 nt, artificial
  Oligomer
aauaaguguugagacacuc

SEQ ID NO: 7148 - RNA, 19 nt, artificial
  Oligomer
ucgaacucuuguugagcag

SEQ ID NO: 7149 - RNA, 19 nt, artificial
  Oligomer
auagcuacuccuugguuuc

SEQ ID NO: 7150 - RNA, 19 nt, artificial
  Oligomer
uagggaaguuacugaaccu

SEQ ID NO: 7151 - RNA, 19 nt, artificial
  Oligomer
ugcucucaaaaccauagag

SEQ ID NO: 7152 - RNA, 19 nt, artificial
  Oligomer
uuugacauuccuuuaaggg

SEQ ID NO: 7153 - RNA, 19 nt, artificial
  Oligomer
auuuggcagcacaacccac

SEQ ID NO: 7154 - RNA, 19 nt, artificial
  Oligomer
uuauuuccucauggaagag

SEQ ID NO: 7155 - RNA, 19 nt, artificial
  Oligomer
aagucuuuuguuucaggcc

SEQ ID NO: 7156 - RNA, 19 nt, artificial
  Oligomer
ugaaauucaggcaggcugc

SEQ ID NO: 7157 - RNA, 19 nt, artificial
  Oligomer
ugagugaccaccuugguga

SEQ ID NO: 7158 - RNA, 19 nt, artificial
  Oligomer
caaccucucacagagauac

SEQ ID NO: 7159 - RNA, 19 nt, artificial
  Oligomer
accucucacagagauacag

SEQ ID NO: 7160 - RNA, 19 nt, artificial
  Oligomer
agucauaggaggguuucca

SEQ ID NO: 7161 - RNA, 19 nt, artificial
  Oligomer
agcaaacugagggauuggg

SEQ ID NO: 7162 - RNA, 19 nt, artificial
  Oligomer
uggauggcaaggccaauga

SEQ ID NO: 7163 - RNA, 19 nt, artificial
  Oligomer
uauaacugagguacccucu

SEQ ID NO: 7164 - RNA, 19 nt, artificial
  Oligomer
cacauuaaauagaugugca

SEQ ID NO: 7165 - RNA, 19 nt, artificial
  Oligomer
aagcagaaaccauccuggu

SEQ ID NO: 7166 - RNA, 19 nt, artificial
  Oligomer
gugcaauggugugaaucgc

SEQ ID NO: 7167 - RNA, 19 nt, artificial
  Oligomer
ugggagacgaaaggaauag

SEQ ID NO: 7168 - RNA, 19 nt, artificial
  Oligomer
aacaacaucaguaugugua

SEQ ID NO: 7169 - RNA, 19 nt, artificial
  Oligomer
acaucaguauguguauacc

SEQ ID NO: 7170 - RNA, 19 nt, artificial
  Oligomer
cuaaaccagucuucugccc

SEQ ID NO: 7171 - RNA, 19 nt, artificial
  Oligomer
aaccagucuucugcccuuc

SEQ ID NO: 7172 - RNA, 19 nt, artificial
  Oligomer
uaguucccagaaaugggag

SEQ ID NO: 7173 - RNA, 19 nt, artificial
  Oligomer
ugauuuagagacucucucu

SEQ ID NO: 7174 - RNA, 19 nt, artificial
  Oligomer
uuugaucucuguauagaga

SEQ ID NO: 7175 - RNA, 19 nt, artificial
  Oligomer
agagauuuuuguuucuggg

SEQ ID NO: 7176 - RNA, 19 nt, artificial
  Oligomer
cagaugcgauccauuuugu

SEQ ID NO: 7177 - RNA, 19 nt, artificial
  Oligomer
gacuagaugagccagaguc

SEQ ID NO: 7178 - RNA, 19 nt, artificial
  Oligomer
ugcuucaaauaagaaugug

SEQ ID NO: 7179 - RNA, 21 nt, artificial
  Oligomer
ggguuuucuuuuuguucuuag

SEQ ID NO: 7180 - RNA, 21 nt, artificial
  Oligomer
caggguuuucuuuuuguucuu

SEQ ID NO: 7181 - RNA, 21 nt, artificial
  Oligomer
gcugaaacccugaguaaacaa

SEQ ID NO: 7182 - RNA, 21 nt, artificial
  Oligomer
gggauaaugaauucaagacaa

SEQ ID NO: 7183 - RNA, 21 nt, artificial
  Oligomer
cgaauauagccuuucugaaau

SEQ ID NO: 7184 - RNA, 21 nt, artificial
  Oligomer
ccacaaauguuuagaacucuu

SEQ ID NO: 7185 - RNA, 21 nt, artificial
  Oligomer
gcccuuaugaauauugaacuu

SEQ ID NO: 7186 - RNA, 21 nt, artificial
  Oligomer
caacugggauaaugaauucaa

SEQ ID NO: 7187 - RNA, 21 nt, artificial
  Oligomer
gcgaauauagccuuucugaaa

SEQ ID NO: 7188 - RNA, 21 nt, artificial
  Oligomer
ccaacugggauaaugaauuca

SEQ ID NO: 7189 - RNA, 21 nt, artificial
  Oligomer
gcugugccucauauuaauuau

SEQ ID NO: 7190 - RNA, 21 nt, artificial
  Oligomer
gcauaauuaaaaccagcuuca

SEQ ID NO: 7191 - RNA, 21 nt, artificial
  Oligomer
ggaaauaaggagaaaagagaa

SEQ ID NO: 7192 - RNA, 21 nt, artificial
  Oligomer
gaaccacacaaugccaagaua

SEQ ID NO: 7193 - RNA, 21 nt, artificial
  Oligomer
gucaacacccuaauaccagaa

SEQ ID NO: 7194 - RNA, 21 nt, artificial
  Oligomer
gugccucauauuaauuaucac

SEQ ID NO: 7195 - RNA, 21 nt, artificial
  Oligomer
gcaggcuuuguaugugaauaa

SEQ ID NO: 7196 - RNA, 21 nt, artificial
  Oligomer
cccagauuucuuaaaguuuga

SEQ ID NO: 7197 - RNA, 21 nt, artificial
  Oligomer
ccacacaaugccaagauagaa

SEQ ID NO: 7198 - RNA, 21 nt, artificial
  Oligomer
agaaccacacaaugccaagau

SEQ ID NO: 7199 - RNA, 21 nt, artificial
  Oligomer
ccaaaagaagaaggaaaccaa

SEQ ID NO: 7200 - RNA, 21 nt, artificial
  Oligomer
acgcugugccucauauuaauu

SEQ ID NO: 7201 - RNA, 21 nt, artificial
  Oligomer
cuuaaaacugugcucaacuau

SEQ ID NO: 7202 - RNA, 21 nt, artificial
  Oligomer
ggaauucuuaaaacugugcuc

SEQ ID NO: 7203 - RNA, 21 nt, artificial
  Oligomer
cagguaucaauucaucuauuc

SEQ ID NO: 7204 - RNA, 21 nt, artificial
  Oligomer
cucagguaucaauucaucuau

SEQ ID NO: 7205 - RNA, 21 nt, artificial
  Oligomer
gaauauagccuuucugaaaug

SEQ ID NO: 7206 - RNA, 21 nt, artificial
  Oligomer
gggacuaggaugaacuaaaua

SEQ ID NO: 7207 - RNA, 21 nt, artificial
  Oligomer
ggaaaaggaaauaaggagaaa

SEQ ID NO: 7208 - RNA, 21 nt, artificial
  Oligomer
ggagccacaaauguuuagaac

SEQ ID NO: 7209 - RNA, 21 nt, artificial
  Oligomer
gagcaggguuuucuuuuuguu

SEQ ID NO: 7210 - RNA, 21 nt, artificial
  Oligomer
cugugugacuaaugguuuauu

SEQ ID NO: 7211 - RNA, 21 nt, artificial
  Oligomer
ggcucuguuuauuguuucaau

SEQ ID NO: 7212 - RNA, 21 nt, artificial
  Oligomer
caguuguucuuugucauacua

SEQ ID NO: 7213 - RNA, 21 nt, artificial
  Oligomer
ggagagugagagaaaauaaaa

SEQ ID NO: 7214 - RNA, 21 nt, artificial
  Oligomer
gccacaaauguuuagaacucu

SEQ ID NO: 7215 - RNA, 21 nt, artificial
  Oligomer
gcaggguuuucuuuuuguucu

SEQ ID NO: 7216 - RNA, 21 nt, artificial
  Oligomer
ccaagagcaggguuuucuuuu

SEQ ID NO: 7217 - RNA, 21 nt, artificial
  Oligomer
acacaaugccaagauagaauu

SEQ ID NO: 7218 - RNA, 21 nt, artificial
  Oligomer
ggauugauuggaguuaaugua

SEQ ID NO: 7219 - RNA, 21 nt, artificial
  Oligomer
cugaaacccugaguaaacaaa

SEQ ID NO: 7220 - RNA, 21 nt, artificial
  Oligomer
ugggauaaugaauucaagaca

SEQ ID NO: 7221 - RNA, 21 nt, artificial
  Oligomer
cgcugugccucauauuaauua

SEQ ID NO: 7222 - RNA, 21 nt, artificial
  Oligomer
gcccgagucaauaauucugau

SEQ ID NO: 7223 - RNA, 21 nt, artificial
  Oligomer
gggaauucuuaaaacugugcu

SEQ ID NO: 7224 - RNA, 21 nt, artificial
  Oligomer
ccaacuaaguuaugaaaguag

SEQ ID NO: 7225 - RNA, 21 nt, artificial
  Oligomer
cuuucuaaccuaugugcauaa

SEQ ID NO: 7226 - RNA, 21 nt, artificial
  Oligomer
cccuuucuaaccuaugugcau

SEQ ID NO: 7227 - RNA, 21 nt, artificial
  Oligomer
aguuauaaggagucugagaau

SEQ ID NO: 7228 - RNA, 21 nt, artificial
  Oligomer
ucaguuguucuuugucauacu

SEQ ID NO: 7229 - RNA, 21 nt, artificial
  Oligomer
uggagccacaaauguuuagaa

SEQ ID NO: 7230 - RNA, 21 nt, artificial
  Oligomer
ucauaaaaugguggcauggau

SEQ ID NO: 7231 - RNA, 21 nt, artificial
  Oligomer
gugugacuaaugguuuauuug

SEQ ID NO: 7232 - RNA, 21 nt, artificial
  Oligomer
ucugugugacuaaugguuuau

SEQ ID NO: 7233 - RNA, 21 nt, artificial
  Oligomer
cacaaugccaagauagaauua

SEQ ID NO: 7234 - RNA, 21 nt, artificial
  Oligomer
cugccucagaauccucaaaau

SEQ ID NO: 7235 - RNA, 21 nt, artificial
  Oligomer
gguuugauacucuuuccacaa

SEQ ID NO: 7236 - RNA, 21 nt, artificial
  Oligomer
gaaaagauucuuggacucaau

SEQ ID NO: 7237 - RNA, 21 nt, artificial
  Oligomer
gaguaaacaaagcaucuccaa

SEQ ID NO: 7238 - RNA, 21 nt, artificial
  Oligomer
ggaguuucaagaugcguggaa

SEQ ID NO: 7239 - RNA, 21 nt, artificial
  Oligomer
gaagugggacaauacauuuuu

SEQ ID NO: 7240 - RNA, 21 nt, artificial
  Oligomer
ggucuuacuuugaagucuuuu

SEQ ID NO: 7241 - RNA, 21 nt, artificial
  Oligomer
aggucuuacuuugaagucuuu

SEQ ID NO: 7242 - RNA, 21 nt, artificial
  Oligomer
gaggucuuacuuugaagucuu

SEQ ID NO: 7243 - RNA, 21 nt, artificial
  Oligomer
ccggaggucuuacuuugaagu

SEQ ID NO: 7244 - RNA, 21 nt, artificial
  Oligomer
ccauccggaggucuuacuuug

SEQ ID NO: 7245 - RNA, 21 nt, artificial
  Oligomer
uaauuaucacuuccuccacca

SEQ ID NO: 7246 - RNA, 21 nt, artificial
  Oligomer
cugugccucauauuaauuauc

SEQ ID NO: 7247 - RNA, 21 nt, artificial
  Oligomer
gcccuuucuaaccuaugugca

SEQ ID NO: 7248 - RNA, 21 nt, artificial
  Oligomer
ggaugaacuaaauaagaacuc

SEQ ID NO: 7249 - RNA, 21 nt, artificial
  Oligomer
ggacuaggaugaacuaaauaa

SEQ ID NO: 7250 - RNA, 21 nt, artificial
  Oligomer
agggacuaggaugaacuaaau

SEQ ID NO: 7251 - RNA, 21 nt, artificial
  Oligomer
agagcaggguuuucuuuuugu

SEQ ID NO: 7252 - RNA, 21 nt, artificial
  Oligomer
caagagcaggguuuucuuuuu

SEQ ID NO: 7253 - RNA, 21 nt, artificial
  Oligomer
agagucucuaaaucacuguua

SEQ ID NO: 7254 - RNA, 21 nt, artificial
  Oligomer
cuagcccuuaugaauauugaa

SEQ ID NO: 7255 - RNA, 21 nt, artificial
  Oligomer
ccagcuagcccuuaugaauau

SEQ ID NO: 7256 - RNA, 21 nt, artificial
  Oligomer
gacuaauuuccugcccaaagu

SEQ ID NO: 7257 - RNA, 21 nt, artificial
  Oligomer
gcaugaaaaaagaggguugga

SEQ ID NO: 7258 - RNA, 21 nt, artificial
  Oligomer
ugaauuuagaaccacacaaug

SEQ ID NO: 7259 - RNA, 21 nt, artificial
  Oligomer
acauaauacauguugagagug

SEQ ID NO: 7260 - RNA, 21 nt, artificial
  Oligomer
gaaauuuuccagaucauuagg

SEQ ID NO: 7261 - RNA, 21 nt, artificial
  Oligomer
ccagguuugauacucuuucca

SEQ ID NO: 7262 - RNA, 21 nt, artificial
  Oligomer
gcauuucauuuucaacaagga

SEQ ID NO: 7263 - RNA, 21 nt, artificial
  Oligomer
ugaauucaagacaauugcaag

SEQ ID NO: 7264 - RNA, 21 nt, artificial
  Oligomer
ggaaaggaacaaugccggcuu

SEQ ID NO: 7265 - RNA, 21 nt, artificial
  Oligomer
caagucagucugguacaaaua

SEQ ID NO: 7266 - RNA, 21 nt, artificial
  Oligomer
gaguuucaagaugcguggaaa

SEQ ID NO: 7267 - RNA, 21 nt, artificial
  Oligomer
ggaagugggacaauacauuuu

SEQ ID NO: 7268 - RNA, 21 nt, artificial
  Oligomer
agaguuuggcugugcauaaua

SEQ ID NO: 7269 - RNA, 21 nt, artificial
  Oligomer
cacgcugugccucauauuaau

SEQ ID NO: 7270 - RNA, 21 nt, artificial
  Oligomer
ugaaugcccgagucaauaauu

SEQ ID NO: 7271 - RNA, 21 nt, artificial
  Oligomer
ucuuaaaacugugcucaacua

SEQ ID NO: 7272 - RNA, 21 nt, artificial
  Oligomer
uucuuaaaacugugcucaacu

SEQ ID NO: 7273 - RNA, 21 nt, artificial
  Oligomer
gaauucuuaaaacugugcuca

SEQ ID NO: 7274 - RNA, 21 nt, artificial
  Oligomer
gcauuuauuaacagguacucu

SEQ ID NO: 7275 - RNA, 21 nt, artificial
  Oligomer
ugaauauaagagugcuuguca

SEQ ID NO: 7276 - RNA, 21 nt, artificial
  Oligomer
ccauugcacaucuauuuaaug

SEQ ID NO: 7277 - RNA, 21 nt, artificial
  Oligomer
acaccauugcacaucuauuua

SEQ ID NO: 7278 - RNA, 21 nt, artificial
  Oligomer
ccuuucuaaccuaugugcaua

SEQ ID NO: 7279 - RNA, 21 nt, artificial
  Oligomer
caguuauaaggagucugagaa

SEQ ID NO: 7280 - RNA, 21 nt, artificial
  Oligomer
ccucagguaucaauucaucua

SEQ ID NO: 7281 - RNA, 21 nt, artificial
  Oligomer
ugaggguaggucugacaaaua

SEQ ID NO: 7282 - RNA, 21 nt, artificial
  Oligomer
gaaaagagaaugggagaguga

SEQ ID NO: 7283 - RNA, 21 nt, artificial
  Oligomer
gaacucuucaacuucgguaau

SEQ ID NO: 7284 - RNA, 21 nt, artificial
  Oligomer
ccuuggagccacaaauguuua

SEQ ID NO: 7285 - RNA, 21 nt, artificial
  Oligomer
agcaggguuuucuuuuuguuc

SEQ ID NO: 7286 - RNA, 21 nt, artificial
  Oligomer
gaacuuaggaauugugacaaa

SEQ ID NO: 7287 - RNA, 21 nt, artificial
  Oligomer
cagcuagcccuuaugaauauu

SEQ ID NO: 7288 - RNA, 21 nt, artificial
  Oligomer
acuaauuuccugcccaaagug

SEQ ID NO: 7289 - RNA, 21 nt, artificial
  Oligomer
gcuccuugugcuauaaaauaa

SEQ ID NO: 7290 - RNA, 21 nt, artificial
  Oligomer
gcucaucuaguccugcuccuu

SEQ ID NO: 7291 - RNA, 21 nt, artificial
  Oligomer
ggguuggagguggagaauuaa

SEQ ID NO: 7292 - RNA, 21 nt, artificial
  Oligomer
gaagcaugaaaaaagaggguu

SEQ ID NO: 7293 - RNA, 21 nt, artificial
  Oligomer
gccaucauuauuaucauacug

SEQ ID NO: 7294 - RNA, 21 nt, artificial
  Oligomer
gcugccucagaauccucaaaa

SEQ ID NO: 7295 - RNA, 21 nt, artificial
  Oligomer
ggaucaaaagguucaguaacu

SEQ ID NO: 7296 - RNA, 21 nt, artificial
  Oligomer
gggagugcauuucauuuucaa

SEQ ID NO: 7297 - RNA, 21 nt, artificial
  Oligomer
gggcucuccauuuuugucauu

SEQ ID NO: 7298 - RNA, 21 nt, artificial
  Oligomer
cgagcuacagaugaagaagaa

SEQ ID NO: 7299 - RNA, 21 nt, artificial
  Oligomer
caaaaccaucgagcuacagau

SEQ ID NO: 7300 - RNA, 21 nt, artificial
  Oligomer
cggaggucuuacuuugaaguc

SEQ ID NO: 7301 - RNA, 21 nt, artificial
  Oligomer
uccggaggucuuacuuugaag

SEQ ID NO: 7302 - RNA, 21 nt, artificial
  Oligomer
gacaggcaaaaugaaaguuau

SEQ ID NO: 7303 - RNA, 21 nt, artificial
  Oligomer
agacaggcaaaaugaaaguua

SEQ ID NO: 7304 - RNA, 21 nt, artificial
  Oligomer
ggagacaggcaaaaugaaagu

SEQ ID NO: 7305 - RNA, 21 nt, artificial
  Oligomer
caggcuuuguaugugaauaau

SEQ ID NO: 7306 - RNA, 21 nt, artificial
  Oligomer
uaaggccugcugugcgaauau

SEQ ID NO: 7307 - RNA, 21 nt, artificial
  Oligomer
ggauuauucaagggacuagga

SEQ ID NO: 7308 - RNA, 21 nt, artificial
  Oligomer
agaaugggagagugagagaaa

SEQ ID NO: 7309 - RNA, 21 nt, artificial
  Oligomer
agaaaagagaaugggagagug

SEQ ID NO: 7310 - RNA, 21 nt, artificial
  Oligomer
guaaugaggaagaaggagaaa

SEQ ID NO: 7311 - RNA, 21 nt, artificial
  Oligomer
gguaaugaggaagaaggagaa

SEQ ID NO: 7312 - RNA, 21 nt, artificial
  Oligomer
cacaaauguuuagaacucuuc

SEQ ID NO: 7313 - RNA, 21 nt, artificial
  Oligomer
cccuuggagccacaaauguuu

SEQ ID NO: 7314 - RNA, 21 nt, artificial
  Oligomer
ccuuucauaaaaugguggcau

SEQ ID NO: 7315 - RNA, 21 nt, artificial
  Oligomer
cacacaaugccaagauagaau

SEQ ID NO: 7316 - RNA, 21 nt, artificial
  Oligomer
ccaucuuacuccagguuugau

SEQ ID NO: 7317 - RNA, 21 nt, artificial
  Oligomer
gaucaaaagguucaguaacuu

SEQ ID NO: 7318 - RNA, 21 nt, artificial
  Oligomer
ggaaaagauucuuggacucaa

SEQ ID NO: 7319 - RNA, 21 nt, artificial
  Oligomer
cucuugccagucugucgaaau

SEQ ID NO: 7320 - RNA, 21 nt, artificial
  Oligomer
ugagucucaggccaaucacuu

SEQ ID NO: 7321 - RNA, 21 nt, artificial
  Oligomer
ccagaugcaggaaaggaacaa

SEQ ID NO: 7322 - RNA, 21 nt, artificial
  Oligomer
ccugaauuucaacugcaugcu

SEQ ID NO: 7323 - RNA, 21 nt, artificial
  Oligomer
ugaggaagacuucuuuaguau

SEQ ID NO: 7324 - RNA, 21 nt, artificial
  Oligomer
uggaagugggacaauacauuu

SEQ ID NO: 7325 - RNA, 21 nt, artificial
  Oligomer
ucaaaauggaagugggacaau

SEQ ID NO: 7326 - RNA, 21 nt, artificial
  Oligomer
ccaccuaaguucuuuuacaca

SEQ ID NO: 7327 - RNA, 21 nt, artificial
  Oligomer
ugguacacacaucaucucuuu

SEQ ID NO: 7328 - RNA, 21 nt, artificial
  Oligomer
acaggcaaaaugaaaguuauc

SEQ ID NO: 7329 - RNA, 21 nt, artificial
  Oligomer
ggcuuuguaugugaauaauuc

SEQ ID NO: 7330 - RNA, 21 nt, artificial
  Oligomer
gaauauaagagugcuugucau

SEQ ID NO: 7331 - RNA, 21 nt, artificial
  Oligomer
accucagguaucaauucaucu

SEQ ID NO: 7332 - RNA, 21 nt, artificial
  Oligomer
gagaaaagagaaugggagagu

SEQ ID NO: 7333 - RNA, 21 nt, artificial
  Oligomer
ggagaaaagagaaugggagag

SEQ ID NO: 7334 - RNA, 21 nt, artificial
  Oligomer
aggagaaaagagaaugggaga

SEQ ID NO: 7335 - RNA, 21 nt, artificial
  Oligomer
gagagucucuaaaucacuguu

SEQ ID NO: 7336 - RNA, 21 nt, artificial
  Oligomer
guccugcuccuugugcuauaa

SEQ ID NO: 7337 - RNA, 21 nt, artificial
  Oligomer
ugaagcaugaaaaaagagggu

SEQ ID NO: 7338 - RNA, 21 nt, artificial
  Oligomer
ccaaggaguagcuauauauuu

SEQ ID NO: 7339 - RNA, 21 nt, artificial
  Oligomer
ugccucagaauccucaaaauc

SEQ ID NO: 7340 - RNA, 21 nt, artificial
  Oligomer
acuccagguuugauacucuuu

SEQ ID NO: 7341 - RNA, 21 nt, artificial
  Oligomer
ucaaaagggaaaggaucaaaa

SEQ ID NO: 7342 - RNA, 21 nt, artificial
  Oligomer
gggaaaagauucuuggacuca

SEQ ID NO: 7343 - RNA, 21 nt, artificial
  Oligomer
uacauuuauguggagcucuau

SEQ ID NO: 7344 - RNA, 21 nt, artificial
  Oligomer
cccugcuuaaaaauggacaaa

SEQ ID NO: 7345 - RNA, 21 nt, artificial
  Oligomer
ggagugcauuucauuuucaac

SEQ ID NO: 7346 - RNA, 21 nt, artificial
  Oligomer
gagucucaggccaaucacuuu

SEQ ID NO: 7347 - RNA, 21 nt, artificial
  Oligomer
ggcacccuuuuacacugacau

SEQ ID NO: 7348 - RNA, 21 nt, artificial
  Oligomer
acauuuuugucaagugcccaa

SEQ ID NO: 7349 - RNA, 21 nt, artificial
  Oligomer
gcgguuuuggcgaucucaaca

SEQ ID NO: 7350 - RNA, 21 nt, artificial
  Oligomer
cccauguuucuguaucucugu

SEQ ID NO: 7351 - RNA, 21 nt, artificial
  Oligomer
gggucccauguuucuguaucu

SEQ ID NO: 7352 - RNA, 21 nt, artificial
  Oligomer
gaacuuggagacaggcaaaau

SEQ ID NO: 7353 - RNA, 21 nt, artificial
  Oligomer
gggaccugggagauaauucua

SEQ ID NO: 7354 - RNA, 21 nt, artificial
  Oligomer
gaauacuugcaggcuuuguau

SEQ ID NO: 7355 - RNA, 21 nt, artificial
  Oligomer
agguuuuucuuaguucuucug

SEQ ID NO: 7356 - RNA, 21 nt, artificial
  Oligomer
agguacucuaagaaugaugaa

SEQ ID NO: 7357 - RNA, 21 nt, artificial
  Oligomer
cuauuuaauguggaauggugu

SEQ ID NO: 7358 - RNA, 21 nt, artificial
  Oligomer
cgucuuccucuuugucuggua

SEQ ID NO: 7359 - RNA, 21 nt, artificial
  Oligomer
cuaucuucaaaaccaacuaag

SEQ ID NO: 7360 - RNA, 21 nt, artificial
  Oligomer
aggcucuguuuauuguuucaa

SEQ ID NO: 7361 - RNA, 21 nt, artificial
  Oligomer
gcugugcgaauauagccuuuc

SEQ ID NO: 7362 - RNA, 21 nt, artificial
  Oligomer
aggccugcugugcgaauauag

SEQ ID NO: 7363 - RNA, 21 nt, artificial
  Oligomer
acucaguuguucuuugucaua

SEQ ID NO: 7364 - RNA, 21 nt, artificial
  Oligomer
ucaagggacuaggaugaacua

SEQ ID NO: 7365 - RNA, 21 nt, artificial
  Oligomer
ugggagagugagagaaaauaa

SEQ ID NO: 7366 - RNA, 21 nt, artificial
  Oligomer
agagaaugggagagugagaga

SEQ ID NO: 7367 - RNA, 21 nt, artificial
  Oligomer
aggaaaaggaaauaaggagaa

SEQ ID NO: 7368 - RNA, 21 nt, artificial
  Oligomer
cuauacagagaucaaauucac

SEQ ID NO: 7369 - RNA, 21 nt, artificial
  Oligomer
gcuagcccuuaugaauauuga

SEQ ID NO: 7370 - RNA, 21 nt, artificial
  Oligomer
caguauugacaucugagcaua

SEQ ID NO: 7371 - RNA, 21 nt, artificial
  Oligomer
accaaggaguagcuauauauu

SEQ ID NO: 7372 - RNA, 21 nt, artificial
  Oligomer
cagaauccucaaaaucaguuu

SEQ ID NO: 7373 - RNA, 21 nt, artificial
  Oligomer
caguaacuucccuaagauuau

SEQ ID NO: 7374 - RNA, 21 nt, artificial
  Oligomer
aaggaucaaaagguucaguaa

SEQ ID NO: 7375 - RNA, 21 nt, artificial
  Oligomer
ggaaaggaucaaaagguucag

SEQ ID NO: 7376 - RNA, 21 nt, artificial
  Oligomer
gaaguuagggaaaagauucuu

SEQ ID NO: 7377 - RNA, 21 nt, artificial
  Oligomer
cucucaguaaugucaguggaa

SEQ ID NO: 7378 - RNA, 21 nt, artificial
  Oligomer
cuaauaccagaauaggaguuu

SEQ ID NO: 7379 - RNA, 21 nt, artificial
  Oligomer
ggaugagucucaggccaauca

SEQ ID NO: 7380 - RNA, 21 nt, artificial
  Oligomer
caauaacgccaccaaucugaa

SEQ ID NO: 7381 - RNA, 21 nt, artificial
  Oligomer
acccuucgcauccauucucaa

SEQ ID NO: 7382 - RNA, 21 nt, artificial
  Oligomer
ggguucaaaauggaaguggga

SEQ ID NO: 7383 - RNA, 21 nt, artificial
  Oligomer
gugagagguuggugcgguuuu

SEQ ID NO: 7384 - RNA, 21 nt, artificial
  Oligomer
gaacaaaaaaucucagaaugg

SEQ ID NO: 7385 - RNA, 21 nt, artificial
  Oligomer
aguuuggcugugcauaauaua

SEQ ID NO: 7386 - RNA, 21 nt, artificial
  Oligomer
agagaguuuggcugugcauaa

SEQ ID NO: 7387 - RNA, 21 nt, artificial
  Oligomer
cucuuugugaucuucuucauu

SEQ ID NO: 7388 - RNA, 21 nt, artificial
  Oligomer
gucuuuugguacacacaucau

SEQ ID NO: 7389 - RNA, 21 nt, artificial
  Oligomer
ggaggucuuacuuugaagucu

SEQ ID NO: 7390 - RNA, 21 nt, artificial
  Oligomer
gcaucacuggaguugucauca

SEQ ID NO: 7391 - RNA, 21 nt, artificial
  Oligomer
gagacaggcaaaaugaaaguu

SEQ ID NO: 7392 - RNA, 21 nt, artificial
  Oligomer
gugaaugcccgagucaauaau

SEQ ID NO: 7393 - RNA, 21 nt, artificial
  Oligomer
ccaagguuuucuaucuucaaa

SEQ ID NO: 7394 - RNA, 21 nt, artificial
  Oligomer
gagaauauuggcccuuucuaa

SEQ ID NO: 7395 - RNA, 21 nt, artificial
  Oligomer
aggguaggucugacaaauaag

SEQ ID NO: 7396 - RNA, 21 nt, artificial
  Oligomer
gacuaggaugaacuaaauaag

SEQ ID NO: 7397 - RNA, 21 nt, artificial
  Oligomer
gggagagugagagaaaauaaa

SEQ ID NO: 7398 - RNA, 21 nt, artificial
  Oligomer
gagucucuaaaucacuguuag

SEQ ID NO: 7399 - RNA, 21 nt, artificial
  Oligomer
gaauauauguucaagagagag

SEQ ID NO: 7400 - RNA, 21 nt, artificial
  Oligomer
guaucugauauggucauuugu

SEQ ID NO: 7401 - RNA, 21 nt, artificial
  Oligomer
ugaacuuaggaauugugacaa

SEQ ID NO: 7402 - RNA, 21 nt, artificial
  Oligomer
aggguucugcacauucuuauu

SEQ ID NO: 7403 - RNA, 21 nt, artificial
  Oligomer
cuacagaagaauauuggauug

SEQ ID NO: 7404 - RNA, 21 nt, artificial
  Oligomer
gccucagaauccucaaaauca

SEQ ID NO: 7405 - RNA, 21 nt, artificial
  Oligomer
uacuccagguuugauacucuu

SEQ ID NO: 7406 - RNA, 21 nt, artificial
  Oligomer
cccuaagauuaugaaacugug

SEQ ID NO: 7407 - RNA, 21 nt, artificial
  Oligomer
guaacuucccuaagauuauga

SEQ ID NO: 7408 - RNA, 21 nt, artificial
  Oligomer
agggaaaagauucuuggacuc

SEQ ID NO: 7409 - RNA, 21 nt, artificial
  Oligomer
ucaguggaaguuagggaaaag

SEQ ID NO: 7410 - RNA, 21 nt, artificial
  Oligomer
ugagagcacuuuuacaaacau

SEQ ID NO: 7411 - RNA, 21 nt, artificial
  Oligomer
ucuaugguuuugagagcacuu

SEQ ID NO: 7412 - RNA, 21 nt, artificial
  Oligomer
gaaauaaauguggguugugcu

SEQ ID NO: 7413 - RNA, 21 nt, artificial
  Oligomer
gugcauuucauuuucaacaag

SEQ ID NO: 7414 - RNA, 21 nt, artificial
  Oligomer
ugaucacaggccugaaacaaa

SEQ ID NO: 7415 - RNA, 21 nt, artificial
  Oligomer
ugaugaggagaaagaugugau

SEQ ID NO: 7416 - RNA, 21 nt, artificial
  Oligomer
cagaugcaggaaaggaacaau

SEQ ID NO: 7417 - RNA, 21 nt, artificial
  Oligomer
gcauccauucucaagucaguc

SEQ ID NO: 7418 - RNA, 21 nt, artificial
  Oligomer
gcaggaguuucaagaugcgug

SEQ ID NO: 7419 - RNA, 21 nt, artificial
  Oligomer
gcacccuuuuacacugacauc

SEQ ID NO: 7420 - RNA, 21 nt, artificial
  Oligomer
caaaauggaagugggacaaua

SEQ ID NO: 7421 - RNA, 21 nt, artificial
  Oligomer
cacucacccuuucaaaaccau

SEQ ID NO: 7422 - RNA, 21 nt, artificial
  Oligomer
ucacucacccuuucaaaacca

SEQ ID NO: 7423 - RNA, 21 nt, artificial
  Oligomer
uccaccuaaguucuuuuacac

SEQ ID NO: 7424 - RNA, 21 nt, artificial
  Oligomer
gguuuuggcgaucucaacaga

SEQ ID NO: 7425 - RNA, 21 nt, artificial
  Oligomer
cgguuuuggcgaucucaacag

SEQ ID NO: 7426 - RNA, 21 nt, artificial
  Oligomer
ugugagagguuggugcgguuu

SEQ ID NO: 7427 - RNA, 21 nt, artificial
  Oligomer
gugaucuucuucauuggccuu

SEQ ID NO: 7428 - RNA, 21 nt, artificial
  Oligomer
gguacacacaucaucucuuug

SEQ ID NO: 7429 - RNA, 21 nt, artificial
  Oligomer
cugaacuuggagacaggcaaa

SEQ ID NO: 7430 - RNA, 21 nt, artificial
  Oligomer
uucuuaguucuucugcuuuug

SEQ ID NO: 7431 - RNA, 21 nt, artificial
  Oligomer
agcauuuauuaacagguacuc

SEQ ID NO: 7432 - RNA, 21 nt, artificial
  Oligomer
cuaaguuaugaaaguagagag

SEQ ID NO: 7433 - RNA, 21 nt, artificial
  Oligomer
uccaagguuuucuaucuucaa

SEQ ID NO: 7434 - RNA, 21 nt, artificial
  Oligomer
caccauugcacaucuauuuaa

SEQ ID NO: 7435 - RNA, 21 nt, artificial
  Oligomer
gaggguaggucugacaaauaa

SEQ ID NO: 7436 - RNA, 21 nt, artificial
  Oligomer
aacucaguuguucuuugucau

SEQ ID NO: 7437 - RNA, 21 nt, artificial
  Oligomer
cauccuaaaauuaacaaccca

SEQ ID NO: 7438 - RNA, 21 nt, artificial
  Oligomer
agcuagcccuuaugaauauug

SEQ ID NO: 7439 - RNA, 21 nt, artificial
  Oligomer
ggguucugcacauucuuauuu

SEQ ID NO: 7440 - RNA, 21 nt, artificial
  Oligomer
cgaagacaacuggacaggaau

SEQ ID NO: 7441 - RNA, 21 nt, artificial
  Oligomer
ucaucauuuaccacugugcuu

SEQ ID NO: 7442 - RNA, 21 nt, artificial
  Oligomer
gaaggaaauuuuccagaucau

SEQ ID NO: 7443 - RNA, 21 nt, artificial
  Oligomer
gugucauuuuugccaucauua

SEQ ID NO: 7444 - RNA, 21 nt, artificial
  Oligomer
caaaagaagaaggaaaccaag

SEQ ID NO: 7445 - RNA, 21 nt, artificial
  Oligomer
cagguuugauacucuuuccac

SEQ ID NO: 7446 - RNA, 21 nt, artificial
  Oligomer
ccuaagauuaugaaacuguga

SEQ ID NO: 7447 - RNA, 21 nt, artificial
  Oligomer
aaaggaucaaaagguucagua

SEQ ID NO: 7448 - RNA, 21 nt, artificial
  Oligomer
caaaagggaaaggaucaaaag

SEQ ID NO: 7449 - RNA, 21 nt, artificial
  Oligomer
ggaaguuagggaaaagauucu

SEQ ID NO: 7450 - RNA, 21 nt, artificial
  Oligomer
caguaaugucaguggaaguua

SEQ ID NO: 7451 - RNA, 21 nt, artificial
  Oligomer
gagagcacuuuuacaaacauu

SEQ ID NO: 7452 - RNA, 21 nt, artificial
  Oligomer
uuacauuuauguggagcucua

SEQ ID NO: 7453 - RNA, 21 nt, artificial
  Oligomer
ccugcuuaaaaauggacaaaa

SEQ ID NO: 7454 - RNA, 21 nt, artificial
  Oligomer
ggcucuccauuuuugucauuc

SEQ ID NO: 7455 - RNA, 21 nt, artificial
  Oligomer
gugaucacaggccugaaacaa

SEQ ID NO: 7456 - RNA, 21 nt, artificial
  Oligomer
cauucucaagucagucuggua

SEQ ID NO: 7457 - RNA, 21 nt, artificial
  Oligomer
cacccuucgcauccauucuca

SEQ ID NO: 7458 - RNA, 21 nt, artificial
  Oligomer
agcuaugagguggugauguua

SEQ ID NO: 7459 - RNA, 21 nt, artificial
  Oligomer
ccugaggaagacuucuuuagu

SEQ ID NO: 7460 - RNA, 21 nt, artificial
  Oligomer
ugauauuccaccuaaguucuu

SEQ ID NO: 7461 - RNA, 21 nt, artificial
  Oligomer
gaguuuggcugugcauaauau

SEQ ID NO: 7462 - RNA, 21 nt, artificial
  Oligomer
gagaguuuggcugugcauaau

SEQ ID NO: 7463 - RNA, 21 nt, artificial
  Oligomer
accggguuuaugauauuccac

SEQ ID NO: 7464 - RNA, 21 nt, artificial
  Oligomer
ucucuuugugaucuucuucau

SEQ ID NO: 7465 - RNA, 21 nt, artificial
  Oligomer
ucaucucuuugugaucuucuu

SEQ ID NO: 7466 - RNA, 21 nt, artificial
  Oligomer
ugaagucuuuugguacacaca

SEQ ID NO: 7467 - RNA, 21 nt, artificial
  Oligomer
cacuuccuccaccaaaaccau

SEQ ID NO: 7468 - RNA, 21 nt, artificial
  Oligomer
ccuuauucaguagcacucucu

SEQ ID NO: 7469 - RNA, 21 nt, artificial
  Oligomer
gugugaaugcccgagucaaua

SEQ ID NO: 7470 - RNA, 21 nt, artificial
  Oligomer
gucuuccucuuugucugguau

SEQ ID NO: 7471 - RNA, 21 nt, artificial
  Oligomer
uugcaggcuuuguaugugaau

SEQ ID NO: 7472 - RNA, 21 nt, artificial
  Oligomer
cuugcaggcuuuguaugugaa

SEQ ID NO: 7473 - RNA, 21 nt, artificial
  Oligomer
cuaagaaugaugaagcauugu

SEQ ID NO: 7474 - RNA, 21 nt, artificial
  Oligomer
ccuuuuuaucucucaagccac

SEQ ID NO: 7475 - RNA, 21 nt, artificial
  Oligomer
guguuucuccaagguuuucua

SEQ ID NO: 7476 - RNA, 21 nt, artificial
  Oligomer
cacaccauugcacaucuauuu

SEQ ID NO: 7477 - RNA, 21 nt, artificial
  Oligomer
caggcucuguuuauuguuuca

SEQ ID NO: 7478 - RNA, 21 nt, artificial
  Oligomer
guguuauuacuaugagucagg

SEQ ID NO: 7479 - RNA, 21 nt, artificial
  Oligomer
guuucugcuuagagacacuua

SEQ ID NO: 7480 - RNA, 21 nt, artificial
  Oligomer
cacugaggguaggucugacaa

SEQ ID NO: 7481 - RNA, 21 nt, artificial
  Oligomer
gcucuccauuuuugucauucu

SEQ ID NO: 7482 - RNA, 21 nt, artificial
  Oligomer
gggauuauucaagggacuagg

SEQ ID NO: 7483 - RNA, 21 nt, artificial
  Oligomer
cugguuuaggaggaaaaggaa

SEQ ID NO: 7484 - RNA, 21 nt, artificial
  Oligomer
cgguaaugaggaagaaggaga

SEQ ID NO: 7485 - RNA, 21 nt, artificial
  Oligomer
cccuuauuuuccguaaauaca

SEQ ID NO: 7486 - RNA, 21 nt, artificial
  Oligomer
aggguuggagguggagaauua

SEQ ID NO: 7487 - RNA, 21 nt, artificial
  Oligomer
agaggguuggagguggagaau

SEQ ID NO: 7488 - RNA, 21 nt, artificial
  Oligomer
ggucaagaacaggcuaaggau

SEQ ID NO: 7489 - RNA, 21 nt, artificial
  Oligomer
gaguucgaagacaacuggaca

SEQ ID NO: 7490 - RNA, 21 nt, artificial
  Oligomer
gaagaaggaaaccaaggagua

SEQ ID NO: 7491 - RNA, 21 nt, artificial
  Oligomer
cucagaauccucaaaaucagu

SEQ ID NO: 7492 - RNA, 21 nt, artificial
  Oligomer
cugucgaaaucugcuguccuu

SEQ ID NO: 7493 - RNA, 21 nt, artificial
  Oligomer
cuaugguuuugagagcacuuu

SEQ ID NO: 7494 - RNA, 21 nt, artificial
  Oligomer
guggagcucuaugguuuugag

SEQ ID NO: 7495 - RNA, 21 nt, artificial
  Oligomer
aggaaauaaauguggguugug

SEQ ID NO: 7496 - RNA, 21 nt, artificial
  Oligomer
gaggaaauaaauguggguugu

SEQ ID NO: 7497 - RNA, 21 nt, artificial
  Oligomer
ugaggaaauaaauguggguug

SEQ ID NO: 7498 - RNA, 21 nt, artificial
  Oligomer
ccaugaggaaauaaauguggg

SEQ ID NO: 7499 - RNA, 21 nt, artificial
  Oligomer
accugaagccuuggcugaaac

SEQ ID NO: 7500 - RNA, 21 nt, artificial
  Oligomer
gaggagaaagaugugaucaca

SEQ ID NO: 7501 - RNA, 21 nt, artificial
  Oligomer
ccaugaugaggagaaagaugu

SEQ ID NO: 7502 - RNA, 21 nt, artificial
  Oligomer
gaaaggaacaaugccggcuuc

SEQ ID NO: 7503 - RNA, 21 nt, artificial
  Oligomer
gccagaugcaggaaaggaaca

SEQ ID NO: 7504 - RNA, 21 nt, artificial
  Oligomer
gucagucugguacaaauauug

SEQ ID NO: 7505 - RNA, 21 nt, artificial
  Oligomer
cauuuuugucauucugguuug

SEQ ID NO: 7506 - RNA, 21 nt, artificial
  Oligomer
ugaagauguguucagcuauga

SEQ ID NO: 7507 - RNA, 21 nt, artificial
  Oligomer
ugcguggaaacuaccuaagau

SEQ ID NO: 7508 - RNA, 21 nt, artificial
  Oligomer
aaaauggaagugggacaauac

SEQ ID NO: 7509 - RNA, 21 nt, artificial
  Oligomer
guuuuggcgaucucaacagaa

SEQ ID NO: 7510 - RNA, 21 nt, artificial
  Oligomer
gugggucccauguuucuguau

SEQ ID NO: 7511 - RNA, 21 nt, artificial
  Oligomer
cucuccauuuuugucauucug

SEQ ID NO: 7512 - RNA, 21 nt, artificial
  Oligomer
ugauccuuauucaguagcacu

SEQ ID NO: 7513 - RNA, 21 nt, artificial
  Oligomer
ugcccgagucaauaauucuga

SEQ ID NO: 7514 - RNA, 21 nt, artificial
  Oligomer
ugcaggcuuuguaugugaaua

SEQ ID NO: 7515 - RNA, 21 nt, artificial
  Oligomer
ugaauacuugcaggcuuugua

SEQ ID NO: 7516 - RNA, 21 nt, artificial
  Oligomer
cucuaagaaugaugaagcauu

SEQ ID NO: 7517 - RNA, 21 nt, artificial
  Oligomer
acucuaagaaugaugaagcau

SEQ ID NO: 7518 - RNA, 21 nt, artificial
  Oligomer
acagguacucuaagaaugaug

SEQ ID NO: 7519 - RNA, 21 nt, artificial
  Oligomer
uguguuauccaguuaugagau

SEQ ID NO: 7520 - RNA, 21 nt, artificial
  Oligomer
gcuucauuuguugcuccgaga

SEQ ID NO: 7521 - RNA, 21 nt, artificial
  Oligomer
ucacaccauugcacaucuauu

SEQ ID NO: 7522 - RNA, 21 nt, artificial
  Oligomer
caagggacuaggaugaacuaa

SEQ ID NO: 7523 - RNA, 21 nt, artificial
  Oligomer
gaaugggagagugagagaaaa

SEQ ID NO: 7524 - RNA, 21 nt, artificial
  Oligomer
gaggaaaaggaaauaaggaga

SEQ ID NO: 7525 - RNA, 21 nt, artificial
  Oligomer
ggaggaaaaggaaauaaggag

SEQ ID NO: 7526 - RNA, 21 nt, artificial
  Oligomer
gaagacugguuuaggaggaaa

SEQ ID NO: 7527 - RNA, 21 nt, artificial
  Oligomer
cucuucaacuucgguaaugag

SEQ ID NO: 7528 - RNA, 21 nt, artificial
  Oligomer
acucuucaacuucgguaauga

SEQ ID NO: 7529 - RNA, 21 nt, artificial
  Oligomer
uguaucugauauggucauuug

SEQ ID NO: 7530 - RNA, 21 nt, artificial
  Oligomer
uccagcuagcccuuaugaaua

SEQ ID NO: 7531 - RNA, 21 nt, artificial
  Oligomer
cuccagcuagcccuuaugaau

SEQ ID NO: 7532 - RNA, 21 nt, artificial
  Oligomer
gguucugcacauucuuauuug

SEQ ID NO: 7533 - RNA, 21 nt, artificial
  Oligomer
cucaucauuuaccacugugcu

SEQ ID NO: 7534 - RNA, 21 nt, artificial
  Oligomer
auacucaucauuuaccacugu

SEQ ID NO: 7535 - RNA, 21 nt, artificial
  Oligomer
gaauauuggauugauuggagu

SEQ ID NO: 7536 - RNA, 21 nt, artificial
  Oligomer
agaauauuggauugauuggag

SEQ ID NO: 7537 - RNA, 21 nt, artificial
  Oligomer
gcauacuccaguuuacuaaua

SEQ ID NO: 7538 - RNA, 21 nt, artificial
  Oligomer
ccagaucauuaggacauaaua

SEQ ID NO: 7539 - RNA, 21 nt, artificial
  Oligomer
ugugucauuuuugccaucauu

SEQ ID NO: 7540 - RNA, 21 nt, artificial
  Oligomer
ucagaauccucaaaaucaguu

SEQ ID NO: 7541 - RNA, 21 nt, artificial
  Oligomer
ccucagaauccucaaaaucag

SEQ ID NO: 7542 - RNA, 21 nt, artificial
  Oligomer
cucuuuccacaauacugagcu

SEQ ID NO: 7543 - RNA, 21 nt, artificial
  Oligomer
ucccuaagauuaugaaacugu

SEQ ID NO: 7544 - RNA, 21 nt, artificial
  Oligomer
gaaaggaucaaaagguucagu

SEQ ID NO: 7545 - RNA, 21 nt, artificial
  Oligomer
aguggaaguuagggaaaagau

SEQ ID NO: 7546 - RNA, 21 nt, artificial
  Oligomer
caguggaaguuagggaaaaga

SEQ ID NO: 7547 - RNA, 21 nt, artificial
  Oligomer
cucaguaaugucaguggaagu

SEQ ID NO: 7548 - RNA, 21 nt, artificial
  Oligomer
ugguuuugagagcacuuuuac

SEQ ID NO: 7549 - RNA, 21 nt, artificial
  Oligomer
caacaaggaaaacuucuaacu

SEQ ID NO: 7550 - RNA, 21 nt, artificial
  Oligomer
cagcuacaacaucuaccucac

SEQ ID NO: 7551 - RNA, 21 nt, artificial
  Oligomer
ccucagcuacaacaucuaccu

SEQ ID NO: 7552 - RNA, 21 nt, artificial
  Oligomer
cuuccucagcuacaacaucua

SEQ ID NO: 7553 - RNA, 21 nt, artificial
  Oligomer
agaugcaggaaaggaacaaug

SEQ ID NO: 7554 - RNA, 21 nt, artificial
  Oligomer
cgcauccauucucaagucagu

SEQ ID NO: 7555 - RNA, 21 nt, artificial
  Oligomer
ucgcauccauucucaagucag

SEQ ID NO: 7556 - RNA, 21 nt, artificial
  Oligomer
cagcuaugagguggugauguu

SEQ ID NO: 7557 - RNA, 21 nt, artificial
  Oligomer
gaagauguguucagcuaugag

SEQ ID NO: 7558 - RNA, 21 nt, artificial
  Oligomer
gauaagcaggaguuucaagau

SEQ ID NO: 7559 - RNA, 21 nt, artificial
  Oligomer
gaggaagacuucuuuaguauc

SEQ ID NO: 7560 - RNA, 21 nt, artificial
  Oligomer
uucaaaauggaagugggacaa

SEQ ID NO: 7561 - RNA, 21 nt, artificial
  Oligomer
caccuaaguucuuuuacacaa

SEQ ID NO: 7562 - RNA, 21 nt, artificial
  Oligomer
gucccauguuucuguaucucu

SEQ ID NO: 7563 - RNA, 21 nt, artificial
  Oligomer
ggucccauguuucuguaucuc

SEQ ID NO: 7564 - RNA, 21 nt, artificial
  Oligomer
guuuaugauauuccaccuaag

SEQ ID NO: 7565 - RNA, 21 nt, artificial
  Oligomer
gaagucuuuugguacacacau

SEQ ID NO: 7566 - RNA, 21 nt, artificial
  Oligomer
uggaguugucaucacgcugug

SEQ ID NO: 7567 - RNA, 21 nt, artificial
  Oligomer
ggcaucacuggaguugucauc

SEQ ID NO: 7568 - RNA, 21 nt, artificial
  Oligomer
ucuaagaaugaugaagcauug

SEQ ID NO: 7569 - RNA, 21 nt, artificial
  Oligomer
cagguacucuaagaaugauga

SEQ ID NO: 7570 - RNA, 21 nt, artificial
  Oligomer
cugaggguaggucugacaaau

SEQ ID NO: 7571 - RNA, 21 nt, artificial
  Oligomer
agaagacugguuuaggaggaa

SEQ ID NO: 7572 - RNA, 21 nt, artificial
  Oligomer
caaggaguagcuauauauuuc

SEQ ID NO: 7573 - RNA, 21 nt, artificial
  Oligomer
gggaaaggaucaaaagguuca

SEQ ID NO: 7574 - RNA, 21 nt, artificial
  Oligomer
aagggaaaggaucaaaagguu

SEQ ID NO: 7575 - RNA, 21 nt, artificial
  Oligomer
aucaaaagggaaaggaucaaa

SEQ ID NO: 7576 - RNA, 21 nt, artificial
  Oligomer
guggaaguuagggaaaagauu

SEQ ID NO: 7577 - RNA, 21 nt, artificial
  Oligomer
gucaguggaaguuagggaaaa

SEQ ID NO: 7578 - RNA, 21 nt, artificial
  Oligomer
ugucaguggaaguuagggaaa

SEQ ID NO: 7579 - RNA, 21 nt, artificial
  Oligomer
ucaguaaugucaguggaaguu

SEQ ID NO: 7580 - RNA, 21 nt, artificial
  Oligomer
ggaaauaaauguggguugugc

SEQ ID NO: 7581 - RNA, 21 nt, artificial
  Oligomer
ugcauuucauuuucaacaagg

SEQ ID NO: 7582 - RNA, 21 nt, artificial
  Oligomer
agcuacaacaucuaccucacu

SEQ ID NO: 7583 - RNA, 21 nt, artificial
  Oligomer
gccuuugagugguuugcagau

SEQ ID NO: 7584 - RNA, 21 nt, artificial
  Oligomer
agucagucugguacaaauauu

SEQ ID NO: 7585 - RNA, 21 nt, artificial
  Oligomer
cccuucgcauccauucucaag

SEQ ID NO: 7586 - RNA, 21 nt, artificial
  Oligomer
aguauccauauccgcaucguu

SEQ ID NO: 7587 - RNA, 21 nt, artificial
  Oligomer
cugaggaagacuucuuuagua

SEQ ID NO: 7588 - RNA, 21 nt, artificial
  Oligomer
caucucuuugugaucuucuuc

SEQ ID NO: 7589 - RNA, 21 nt, artificial
  Oligomer
agucuuuugguacacacauca

SEQ ID NO: 7590 - RNA, 21 nt, artificial
  Oligomer
aggcaucacuggaguugucau

SEQ ID NO: 7591 - RNA, 21 nt, artificial
  Oligomer
ugaacuuggagacaggcaaaa

SEQ ID NO: 7592 - RNA, 21 nt, artificial
  Oligomer
uaauguggaauggugugugaa

SEQ ID NO: 7593 - RNA, 21 nt, artificial
  Oligomer
uaacagguacucuaagaauga

SEQ ID NO: 7594 - RNA, 21 nt, artificial
  Oligomer
cuccaagguuuucuaucuuca

SEQ ID NO: 7595 - RNA, 21 nt, artificial
  Oligomer
uucuccaagguuuucuaucuu

SEQ ID NO: 7596 - RNA, 21 nt, artificial
  Oligomer
uguuucuccaagguuuucuau

SEQ ID NO: 7597 - RNA, 21 nt, artificial
  Oligomer
uucacaccauugcacaucuau

SEQ ID NO: 7598 - RNA, 21 nt, artificial
  Oligomer
gguuuaggaggaaaaggaaau

SEQ ID NO: 7599 - RNA, 21 nt, artificial
  Oligomer
agacugguuuaggaggaaaag

SEQ ID NO: 7600 - RNA, 21 nt, artificial
  Oligomer
guaaauacacacacaaaaugg

SEQ ID NO: 7601 - RNA, 21 nt, artificial
  Oligomer
guucugcacauucuuauuuga

SEQ ID NO: 7602 - RNA, 21 nt, artificial
  Oligomer
ccugaaggguucugcacauuc

SEQ ID NO: 7603 - RNA, 21 nt, artificial
  Oligomer
agaacaggcuaaggauacuaa

SEQ ID NO: 7604 - RNA, 21 nt, artificial
  Oligomer
aggguaacugggccagauguu

SEQ ID NO: 7605 - RNA, 21 nt, artificial
  Oligomer
uugugucauuuuugccaucau

SEQ ID NO: 7606 - RNA, 21 nt, artificial
  Oligomer
agggaaaggaucaaaagguuc

SEQ ID NO: 7607 - RNA, 21 nt, artificial
  Oligomer
uagaaucaaaagggaaaggau

SEQ ID NO: 7608 - RNA, 21 nt, artificial
  Oligomer
uguaaugguuuucccuuaaag

SEQ ID NO: 7609 - RNA, 21 nt, artificial
  Oligomer
ucaacaaggaaaacuucuaac

SEQ ID NO: 7610 - RNA, 21 nt, artificial
  Oligomer
ugccuuugagugguuugcaga

SEQ ID NO: 7611 - RNA, 21 nt, artificial
  Oligomer
agauguguucagcuaugaggu

SEQ ID NO: 7612 - RNA, 21 nt, artificial
  Oligomer
agaaaacuucuugggucagca

SEQ ID NO: 7613 - RNA, 21 nt, artificial
  Oligomer
gacuucuuuaguauccauauc

SEQ ID NO: 7614 - RNA, 21 nt, artificial
  Oligomer
uggcacccuuuuacacugaca

SEQ ID NO: 7615 - RNA, 21 nt, artificial
  Oligomer
caagugcccaaagguguccaa

SEQ ID NO: 7616 - RNA, 21 nt, artificial
  Oligomer
gggacaauacauuuuugucaa

SEQ ID NO: 7617 - RNA, 21 nt, artificial
  Oligomer
ccuaugacuuggaaauggaua

SEQ ID NO: 7618 - RNA, 21 nt, artificial
  Oligomer
ucuuccucuuugucugguauu

SEQ ID NO: 7619 - RNA, 21 nt, artificial
  Oligomer
ggaccugggagauaauucuac

SEQ ID NO: 7620 - RNA, 21 nt, artificial
  Oligomer
gugcauaauuaaaaccagcuu

SEQ ID NO: 7621 - RNA, 21 nt, artificial
  Oligomer
aaguaugaacuggagagggua

SEQ ID NO: 7622 - RNA, 21 nt, artificial
  Oligomer
acuaugagucaggcucuguuu

SEQ ID NO: 7623 - RNA, 21 nt, artificial
  Oligomer
guuuaggaggaaaaggaaaua

SEQ ID NO: 7624 - RNA, 21 nt, artificial
  Oligomer
aagacugguuuaggaggaaaa

SEQ ID NO: 7625 - RNA, 21 nt, artificial
  Oligomer
ggaucgcaucugugugacuaa

SEQ ID NO: 7626 - RNA, 21 nt, artificial
  Oligomer
gaaggguucugcacauucuua

SEQ ID NO: 7627 - RNA, 21 nt, artificial
  Oligomer
cuagggucaagaacaggcuaa

SEQ ID NO: 7628 - RNA, 21 nt, artificial
  Oligomer
agaagaaggaaaccaaggagu

SEQ ID NO: 7629 - RNA, 21 nt, artificial
  Oligomer
cuucccuaagauuaugaaacu

SEQ ID NO: 7630 - RNA, 21 nt, artificial
  Oligomer
gaaagaugugaucacaggccu

SEQ ID NO: 7631 - RNA, 21 nt, artificial
  Oligomer
gaaaacuucuugggucagcac

SEQ ID NO: 7632 - RNA, 21 nt, artificial
  Oligomer
guggcacccuuuuacacugac

SEQ ID NO: 7633 - RNA, 21 nt, artificial
  Oligomer
gagcuacagaugaagaagaag

SEQ ID NO: 7634 - RNA, 21 nt, artificial
  Oligomer
gugaaauuugaauacuugcag

SEQ ID NO: 7635 - RNA, 21 nt, artificial
  Oligomer
ugguuuaggaggaaaaggaaa

SEQ ID NO: 7636 - RNA, 21 nt, artificial
  Oligomer
gggucaagaacaggcuaagga

SEQ ID NO: 7637 - RNA, 21 nt, artificial
  Oligomer
guaacugggccagauguucuu

SEQ ID NO: 7638 - RNA, 21 nt, artificial
  Oligomer
acuuugugucauuuuugccau

SEQ ID NO: 7639 - RNA, 21 nt, artificial
  Oligomer
guaaugucaguggaaguuagg

SEQ ID NO: 7640 - RNA, 21 nt, artificial
  Oligomer
guaaugguuuucccuuaaagg

SEQ ID NO: 7641 - RNA, 21 nt, artificial
  Oligomer
ggcccaacugggauaaugaau

SEQ ID NO: 7642 - RNA, 21 nt, artificial
  Oligomer
cuacaacaucuaccucacugg

SEQ ID NO: 7643 - RNA, 21 nt, artificial
  Oligomer
guggugauguuagugggagca

SEQ ID NO: 7644 - RNA, 21 nt, artificial
  Oligomer
gcguggaaacuaccuaagaua

SEQ ID NO: 7645 - RNA, 21 nt, artificial
  Oligomer
caauacauuuuugucaagugc

SEQ ID NO: 7646 - RNA, 21 nt, artificial
  Oligomer
agugggucccauguuucugua

SEQ ID NO: 7647 - RNA, 21 nt, artificial
  Oligomer
gcuuuugcaauuguguuugug

SEQ ID NO: 7648 - RNA, 21 nt, artificial
  Oligomer
cuggagaggguaccucaguua

SEQ ID NO: 7649 - RNA, 21 nt, artificial
  Oligomer
gcagacuaauuuccugcccaa

SEQ ID NO: 7650 - RNA, 21 nt, artificial
  Oligomer
cugcuccuugugcuauaaaau

SEQ ID NO: 7651 - RNA, 21 nt, artificial
  Oligomer
aagaacaggcuaaggauacua

SEQ ID NO: 7652 - RNA, 21 nt, artificial
  Oligomer
gucaagaacaggcuaaggaua

SEQ ID NO: 7653 - RNA, 21 nt, artificial
  Oligomer
acaucugagcauacuccaguu

SEQ ID NO: 7654 - RNA, 21 nt, artificial
  Oligomer
uccagaucauuaggacauaau

SEQ ID NO: 7655 - RNA, 21 nt, artificial
  Oligomer
cuacuuugugucauuuuugcc

SEQ ID NO: 7656 - RNA, 21 nt, artificial
  Oligomer
aggaaugucaaagauuguuug

SEQ ID NO: 7657 - RNA, 21 nt, artificial
  Oligomer
gcaagucaacacccuaauacc

SEQ ID NO: 7658 - RNA, 21 nt, artificial
  Oligomer
gagguggugauguuaguggga

SEQ ID NO: 7659 - RNA, 21 nt, artificial
  Oligomer
ggagcugaacgaauuguacgu

SEQ ID NO: 7660 - RNA, 21 nt, artificial
  Oligomer
ugucugguauuaccggguuua

SEQ ID NO: 7661 - RNA, 21 nt, artificial
  Oligomer
auuugaauacuugcaggcuuu

SEQ ID NO: 7662 - RNA, 21 nt, artificial
  Oligomer
cugugcgaauauagccuuucu

SEQ ID NO: 7663 - RNA, 21 nt, artificial
  Oligomer
cgcaucugugugacuaauggu

SEQ ID NO: 7664 - RNA, 21 nt, artificial
  Oligomer
gcacauucuuauuugaagcau

SEQ ID NO: 7665 - RNA, 21 nt, artificial
  Oligomer
ugauucucccuagggucaaga

SEQ ID NO: 7666 - RNA, 21 nt, artificial
  Oligomer
ccuuggcugaaacccugagua

SEQ ID NO: 7667 - RNA, 21 nt, artificial
  Oligomer
cggcccaacugggauaaugaa

SEQ ID NO: 7668 - RNA, 21 nt, artificial
  Oligomer
ggccaaucacuuugcugugca

SEQ ID NO: 7669 - RNA, 21 nt, artificial
  Oligomer
cucaagucagucugguacaaa

SEQ ID NO: 7670 - RNA, 21 nt, artificial
  Oligomer
uugucugguauuaccggguuu

SEQ ID NO: 7671 - RNA, 21 nt, artificial
  Oligomer
gugcgaauauagccuuucuga

SEQ ID NO: 7672 - RNA, 21 nt, artificial
  Oligomer
ggaugauugcacuucacucug

SEQ ID NO: 7673 - RNA, 21 nt, artificial
  Oligomer
ggaaucucaccuuucauaaaa

SEQ ID NO: 7674 - RNA, 21 nt, artificial
  Oligomer
uccugcuccuugugcuauaaa

SEQ ID NO: 7675 - RNA, 21 nt, artificial
  Oligomer
cauacuccaguuuacuaauac

SEQ ID NO: 7676 - RNA, 21 nt, artificial
  Oligomer
ucaagacaauugcaagucaac

SEQ ID NO: 7677 - RNA, 21 nt, artificial
  Oligomer
cccaacugggauaaugaauuc

SEQ ID NO: 7678 - RNA, 21 nt, artificial
  Oligomer
caccaaucugaagcucaaaaa

SEQ ID NO: 7679 - RNA, 21 nt, artificial
  Oligomer
auauugcaauaacgccaccaa

SEQ ID NO: 7680 - RNA, 21 nt, artificial
  Oligomer
cuaccuaagauagcgguugau

SEQ ID NO: 7681 - RNA, 21 nt, artificial
  Oligomer
agaugcguggaaacuaccuaa

SEQ ID NO: 7682 - RNA, 21 nt, artificial
  Oligomer
cauggagcugaacgaauugua

SEQ ID NO: 7683 - RNA, 21 nt, artificial
  Oligomer
ccaaaaccauccggaggucuu

SEQ ID NO: 7684 - RNA, 21 nt, artificial
  Oligomer
gcacaucuauuuaauguggaa

SEQ ID NO: 7685 - RNA, 21 nt, artificial
  Oligomer
ggagguauacacauacugaug

SEQ ID NO: 7686 - RNA, 21 nt, artificial
  Oligomer
gaagggcagaagacugguuua

SEQ ID NO: 7687 - RNA, 21 nt, artificial
  Oligomer
ugggaacuaaaaccaguuuua

SEQ ID NO: 7688 - RNA, 21 nt, artificial
  Oligomer
gccaugacucuggcucaucua

SEQ ID NO: 7689 - RNA, 21 nt, artificial
  Oligomer
cuggacaggaaucucaccuuu

SEQ ID NO: 7690 - RNA, 21 nt, artificial
  Oligomer
ucgaagacaacuggacaggaa

SEQ ID NO: 7691 - RNA, 21 nt, artificial
  Oligomer
ccaguuuacuaauacagcagg

SEQ ID NO: 7692 - RNA, 21 nt, artificial
  Oligomer
agcauacuccaguuuacuaau

SEQ ID NO: 7693 - RNA, 21 nt, artificial
  Oligomer
cugagcauacuccaguuuacu

SEQ ID NO: 7694 - RNA, 21 nt, artificial
  Oligomer
caucugagcauacuccaguuu

SEQ ID NO: 7695 - RNA, 21 nt, artificial
  Oligomer
ggaaauuuuccagaucauuag

SEQ ID NO: 7696 - RNA, 21 nt, artificial
  Oligomer
cuuggcugaaacccugaguaa

SEQ ID NO: 7697 - RNA, 21 nt, artificial
  Oligomer
caacacccuaauaccagaaua

SEQ ID NO: 7698 - RNA, 21 nt, artificial
  Oligomer
caauugcaagucaacacccua

SEQ ID NO: 7699 - RNA, 21 nt, artificial
  Oligomer
uucaagacaauugcaagucaa

SEQ ID NO: 7700 - RNA, 21 nt, artificial
  Oligomer
gcccaacugggauaaugaauu

SEQ ID NO: 7701 - RNA, 21 nt, artificial
  Oligomer
acggcccaacugggauaauga

SEQ ID NO: 7702 - RNA, 21 nt, artificial
  Oligomer
gccaaucacuuugcugugcac

SEQ ID NO: 7703 - RNA, 21 nt, artificial
  Oligomer
cggcuuccucagcuacaacau

SEQ ID NO: 7704 - RNA, 21 nt, artificial
  Oligomer
ggacaauacauuuuugucaag

SEQ ID NO: 7705 - RNA, 21 nt, artificial
  Oligomer
cccuuucaaaaccaucgagcu

SEQ ID NO: 7706 - RNA, 21 nt, artificial
  Oligomer
cuggaaacccuccuaugacuu

SEQ ID NO: 7707 - RNA, 21 nt, artificial
  Oligomer
gcagagaguuuggcugugcau

SEQ ID NO: 7708 - RNA, 21 nt, artificial
  Oligomer
ugcucgaaagagaauaaagaa

SEQ ID NO: 7709 - RNA, 21 nt, artificial
  Oligomer
gguaccucaguuauaaggagu

SEQ ID NO: 7710 - RNA, 21 nt, artificial
  Oligomer
gcaccucagguaucaauucau

SEQ ID NO: 7711 - RNA, 21 nt, artificial
  Oligomer
cugcugugcgaauauagccuu

SEQ ID NO: 7712 - RNA, 21 nt, artificial
  Oligomer
ggccaagagcaggguuuucuu

SEQ ID NO: 7713 - RNA, 21 nt, artificial
  Oligomer
caagagagagucucuaaauca

SEQ ID NO: 7714 - RNA, 21 nt, artificial
  Oligomer
ccugcuccuugugcuauaaaa

SEQ ID NO: 7715 - RNA, 21 nt, artificial
  Oligomer
ggacauaauacauguugagag

SEQ ID NO: 7716 - RNA, 21 nt, artificial
  Oligomer
ugaaggaaauuuuccagauca

SEQ ID NO: 7717 - RNA, 21 nt, artificial
  Oligomer
ucaacacccuaauaccagaau

SEQ ID NO: 7718 - RNA, 21 nt, artificial
  Oligomer
gggacacacaugccuuugagu

SEQ ID NO: 7719 - RNA, 21 nt, artificial
  Oligomer
ucaagucagucugguacaaau

SEQ ID NO: 7720 - RNA, 21 nt, artificial
  Oligomer
ugugauaagcaggaguuucaa

SEQ ID NO: 7721 - RNA, 21 nt, artificial
  Oligomer
cccugaggaagacuucuuuag

SEQ ID NO: 7722 - RNA, 21 nt, artificial
  Oligomer
cgaucucaacagaaggugguc

SEQ ID NO: 7723 - RNA, 21 nt, artificial
  Oligomer
ccauguuucuguaucucugug

SEQ ID NO: 7724 - RNA, 21 nt, artificial
  Oligomer
ccauggagcugaacgaauugu

SEQ ID NO: 7725 - RNA, 21 nt, artificial
  Oligomer
ucaauuuugcucgaaagagaa

SEQ ID NO: 7726 - RNA, 21 nt, artificial
  Oligomer
gcccuguguuauccaguuaug

SEQ ID NO: 7727 - RNA, 21 nt, artificial
  Oligomer
cugcccuguguuauccaguua

SEQ ID NO: 7728 - RNA, 21 nt, artificial
  Oligomer
guaccucaguuauaaggaguc

SEQ ID NO: 7729 - RNA, 21 nt, artificial
  Oligomer
acacauacugauguuguuuug

SEQ ID NO: 7730 - RNA, 21 nt, artificial
  Oligomer
aggaagaaggagaaagagcug

SEQ ID NO: 7731 - RNA, 21 nt, artificial
  Oligomer
gggaacuaaaaccaguuuuau

SEQ ID NO: 7732 - RNA, 21 nt, artificial
  Oligomer
cuuuuuguucuuagaacugcu

SEQ ID NO: 7733 - RNA, 21 nt, artificial
  Oligomer
guugaacgucuuccucuuugu

SEQ ID NO: 7734 - RNA, 21 nt, artificial
  Oligomer
cagacuaauuuccugcccaaa

SEQ ID NO: 7735 - RNA, 21 nt, artificial
  Oligomer
cuaguccugcuccuugugcua

SEQ ID NO: 7736 - RNA, 21 nt, artificial
  Oligomer
caggaaucucaccuuucauaa

SEQ ID NO: 7737 - RNA, 21 nt, artificial
  Oligomer
acaggaaucucaccuuucaua

SEQ ID NO: 7738 - RNA, 21 nt, artificial
  Oligomer
ggaguuaauguaauacucauc

SEQ ID NO: 7739 - RNA, 21 nt, artificial
  Oligomer
gggccagauguucuuucuaca

SEQ ID NO: 7740 - RNA, 21 nt, artificial
  Oligomer
aucugagcauacuccaguuua

SEQ ID NO: 7741 - RNA, 21 nt, artificial
  Oligomer
ucaacaagaguucgaagacaa

SEQ ID NO: 7742 - RNA, 21 nt, artificial
  Oligomer
uuccagaucauuaggacauaa

SEQ ID NO: 7743 - RNA, 21 nt, artificial
  Oligomer
cugaaggaaauuuuccagauc

SEQ ID NO: 7744 - RNA, 21 nt, artificial
  Oligomer
ccaaaugcucaaauaaugcua

SEQ ID NO: 7745 - RNA, 21 nt, artificial
  Oligomer
ggcugaaacccugaguaaaca

SEQ ID NO: 7746 - RNA, 21 nt, artificial
  Oligomer
ccagaauaggaguuuuccucu

SEQ ID NO: 7747 - RNA, 21 nt, artificial
  Oligomer
agaugugaucacaggccugaa

SEQ ID NO: 7748 - RNA, 21 nt, artificial
  Oligomer
gaauuucaacugcaugcugau

SEQ ID NO: 7749 - RNA, 21 nt, artificial
  Oligomer
ccuuucaaaaccaucgagcua

SEQ ID NO: 7750 - RNA, 21 nt, artificial
  Oligomer
cauguuucuguaucucuguga

SEQ ID NO: 7751 - RNA, 21 nt, artificial
  Oligomer
gaaaaauaaaggaaugcccaa

SEQ ID NO: 7752 - RNA, 21 nt, artificial
  Oligomer
cgagucaauaauucugauccu

SEQ ID NO: 7753 - RNA, 21 nt, artificial
  Oligomer
guucuucugcuuuugcaauug

SEQ ID NO: 7754 - RNA, 21 nt, artificial
  Oligomer
ugcccuguguuauccaguuau

SEQ ID NO: 7755 - RNA, 21 nt, artificial
  Oligomer
gucugagaauauuggcccuuu

SEQ ID NO: 7756 - RNA, 21 nt, artificial
  Oligomer
ggagaggguaccucaguuaua

SEQ ID NO: 7757 - RNA, 21 nt, artificial
  Oligomer
uucuuagaacugcucccauuu

SEQ ID NO: 7758 - RNA, 21 nt, artificial
  Oligomer
ccguaaauacacacacaaaau

SEQ ID NO: 7759 - RNA, 21 nt, artificial
  Oligomer
acuggacaggaaucucaccuu

SEQ ID NO: 7760 - RNA, 21 nt, artificial
  Oligomer
gaaugaauuuagaaccacaca

SEQ ID NO: 7761 - RNA, 21 nt, artificial
  Oligomer
guuuacuaauacagcagggua

SEQ ID NO: 7762 - RNA, 21 nt, artificial
  Oligomer
agagugucucaacacuuauua

SEQ ID NO: 7763 - RNA, 21 nt, artificial
  Oligomer
ugagagugucucaacacuuau

SEQ ID NO: 7764 - RNA, 21 nt, artificial
  Oligomer
ggaaaccaaggaguagcuaua

SEQ ID NO: 7765 - RNA, 21 nt, artificial
  Oligomer
guucaguaacuucccuaagau

SEQ ID NO: 7766 - RNA, 21 nt, artificial
  Oligomer
cucuuccaugaggaaauaaau

SEQ ID NO: 7767 - RNA, 21 nt, artificial
  Oligomer
cccugaguaaacaaagcaucu

SEQ ID NO: 7768 - RNA, 21 nt, artificial
  Oligomer
ugaaacccugaguaaacaaag

SEQ ID NO: 7769 - RNA, 21 nt, artificial
  Oligomer
gaccugaagccuuggcugaaa

SEQ ID NO: 7770 - RNA, 21 nt, artificial
  Oligomer
gugcaccaugaugaggagaaa

SEQ ID NO: 7771 - RNA, 21 nt, artificial
  Oligomer
cugccugaauuucaacugcau

SEQ ID NO: 7772 - RNA, 21 nt, artificial
  Oligomer
gucacacccuucgcauccauu

SEQ ID NO: 7773 - RNA, 21 nt, artificial
  Oligomer
ucaaugcuuguggcugugaua

SEQ ID NO: 7774 - RNA, 21 nt, artificial
  Oligomer
agcuggaguggcacccuuuua

SEQ ID NO: 7775 - RNA, 21 nt, artificial
  Oligomer
ccaucgagcuacagaugaaga

SEQ ID NO: 7776 - RNA, 21 nt, artificial
  Oligomer
ggguuuaugauauuccaccua

SEQ ID NO: 7777 - RNA, 21 nt, artificial
  Oligomer
gcugugcauaauauaacaguu

SEQ ID NO: 7778 - RNA, 21 nt, artificial
  Oligomer
uucauuggccuugccauccau

SEQ ID NO: 7779 - RNA, 21 nt, artificial
  Oligomer
caaaaccauccggaggucuua

SEQ ID NO: 7780 - RNA, 21 nt, artificial
  Oligomer
cccuguguuauccaguuauga

SEQ ID NO: 7781 - RNA, 21 nt, artificial
  Oligomer
auauuggcccuuucuaaccua

SEQ ID NO: 7782 - RNA, 21 nt, artificial
  Oligomer
ggguaccucaguuauaaggag

SEQ ID NO: 7783 - RNA, 21 nt, artificial
  Oligomer
ugcgaauauagccuuucugaa

SEQ ID NO: 7784 - RNA, 21 nt, artificial
  Oligomer
ugcugugcgaauauagccuuu

SEQ ID NO: 7785 - RNA, 21 nt, artificial
  Oligomer
cugacaaauaaggccugcugu

SEQ ID NO: 7786 - RNA, 21 nt, artificial
  Oligomer
gggucucauauuggucauucc

SEQ ID NO: 7787 - RNA, 21 nt, artificial
  Oligomer
gcauggaugauugcacuucac

SEQ ID NO: 7788 - RNA, 21 nt, artificial
  Oligomer
guggcauggaugauugcacuu

SEQ ID NO: 7789 - RNA, 21 nt, artificial
  Oligomer
cucccauuucugggaacuaaa

SEQ ID NO: 7790 - RNA, 21 nt, artificial
  Oligomer
agaauuaaccuccugccauga

SEQ ID NO: 7791 - RNA, 21 nt, artificial
  Oligomer
gacaggaaucucaccuuucau

SEQ ID NO: 7792 - RNA, 21 nt, artificial
  Oligomer
ggguugaacgucuuccucuuu

SEQ ID NO: 7793 - RNA, 21 nt, artificial
  Oligomer
ggccagauguucuuucuacag

SEQ ID NO: 7794 - RNA, 21 nt, artificial
  Oligomer
uccaguuuacuaauacagcag

SEQ ID NO: 7795 - RNA, 21 nt, artificial
  Oligomer
gagcauacuccaguuuacuaa

SEQ ID NO: 7796 - RNA, 21 nt, artificial
  Oligomer
gacauaauacauguugagagu

SEQ ID NO: 7797 - RNA, 21 nt, artificial
  Oligomer
aggacauaauacauguugaga

SEQ ID NO: 7798 - RNA, 21 nt, artificial
  Oligomer
acugaaggaaauuuuccagau

SEQ ID NO: 7799 - RNA, 21 nt, artificial
  Oligomer
gaaaccaaggaguagcuauau

SEQ ID NO: 7800 - RNA, 21 nt, artificial
  Oligomer
agcccaucuuacuccagguuu

SEQ ID NO: 7801 - RNA, 21 nt, artificial
  Oligomer
caggccugaaacaaaagacuu

SEQ ID NO: 7802 - RNA, 21 nt, artificial
  Oligomer
caccaugaugaggagaaagau

SEQ ID NO: 7803 - RNA, 21 nt, artificial
  Oligomer
cacuuugcugugcaccaugau

SEQ ID NO: 7804 - RNA, 21 nt, artificial
  Oligomer
ccaaucacuuugcugugcacc

SEQ ID NO: 7805 - RNA, 21 nt, artificial
  Oligomer
gccaccaaucugaagcucaaa

SEQ ID NO: 7806 - RNA, 21 nt, artificial
  Oligomer
uggcugugauaagcaggaguu

SEQ ID NO: 7807 - RNA, 21 nt, artificial
  Oligomer
guggucacucacccuuucaaa

SEQ ID NO: 7808 - RNA, 21 nt, artificial
  Oligomer
gcgaucucaacagaagguggu

SEQ ID NO: 7809 - RNA, 21 nt, artificial
  Oligomer
gugcgguuuuggcgaucucaa

SEQ ID NO: 7810 - RNA, 21 nt, artificial
  Oligomer
gaaugcccaaucccucaguuu

SEQ ID NO: 7811 - RNA, 21 nt, artificial
  Oligomer
ggaaaaauaaaggaaugccca

SEQ ID NO: 7812 - RNA, 21 nt, artificial
  Oligomer
aaccauccggaggucuuacuu

SEQ ID NO: 7813 - RNA, 21 nt, artificial
  Oligomer
accaaaaccauccggaggucu

SEQ ID NO: 7814 - RNA, 21 nt, artificial
  Oligomer
gagucaauaauucugauccuu

SEQ ID NO: 7815 - RNA, 21 nt, artificial
  Oligomer
cccgagucaauaauucugauc

SEQ ID NO: 7816 - RNA, 21 nt, artificial
  Oligomer
ugcacaucuauuuaaugugga

SEQ ID NO: 7817 - RNA, 21 nt, artificial
  Oligomer
ugcauaauuaaaaccagcuuc

SEQ ID NO: 7818 - RNA, 21 nt, artificial
  Oligomer
cugagaauauuggcccuuucu

SEQ ID NO: 7819 - RNA, 21 nt, artificial
  Oligomer
ucacucugcgauucacaccau

SEQ ID NO: 7820 - RNA, 21 nt, artificial
  Oligomer
cuuucugaaauguaccaggau

SEQ ID NO: 7821 - RNA, 21 nt, artificial
  Oligomer
ccuuucugaaauguaccagga

SEQ ID NO: 7822 - RNA, 21 nt, artificial
  Oligomer
ggucacaaauuuugaugcuga

SEQ ID NO: 7823 - RNA, 21 nt, artificial
  Oligomer
agguauacacauacugauguu

SEQ ID NO: 7824 - RNA, 21 nt, artificial
  Oligomer
gccaagagcaggguuuucuuu

SEQ ID NO: 7825 - RNA, 21 nt, artificial
  Oligomer
uguucaagagagagucucuaa

SEQ ID NO: 7826 - RNA, 21 nt, artificial
  Oligomer
cccagaaacaaaaaucucuau

SEQ ID NO: 7827 - RNA, 21 nt, artificial
  Oligomer
ccuaaaauuaacaacccagaa

SEQ ID NO: 7828 - RNA, 21 nt, artificial
  Oligomer
gcaucugugugacuaaugguu

SEQ ID NO: 7829 - RNA, 21 nt, artificial
  Oligomer
gcggauacucaaguaaguuuu

SEQ ID NO: 7830 - RNA, 21 nt, artificial
  Oligomer
ugagcauacuccaguuuacua

SEQ ID NO: 7831 - RNA, 21 nt, artificial
  Oligomer
caauacugagcugccucagaa

SEQ ID NO: 7832 - RNA, 21 nt, artificial
  Oligomer
gugcugccaaaugcucaaaua

SEQ ID NO: 7833 - RNA, 21 nt, artificial
  Oligomer
agaauaggaguuuuccucugu

SEQ ID NO: 7834 - RNA, 21 nt, artificial
  Oligomer
cccuaauaccagaauaggagu

SEQ ID NO: 7835 - RNA, 21 nt, artificial
  Oligomer
uugcaagucaacacccuaaua

SEQ ID NO: 7836 - RNA, 21 nt, artificial
  Oligomer
agccugccugaauuucaacug

SEQ ID NO: 7837 - RNA, 21 nt, artificial
  Oligomer
gcagccugccugaauuucaac

SEQ ID NO: 7838 - RNA, 21 nt, artificial
  Oligomer
caaugcuuguggcugugauaa

SEQ ID NO: 7839 - RNA, 21 nt, artificial
  Oligomer
cuggaguggcacccuuuuaca

SEQ ID NO: 7840 - RNA, 21 nt, artificial
  Oligomer
uccauuuuugucauucugguu

SEQ ID NO: 7841 - RNA, 21 nt, artificial
  Oligomer
acagaagguggucaucaccaa

SEQ ID NO: 7842 - RNA, 21 nt, artificial
  Oligomer
aucucaacagaagguggucau

SEQ ID NO: 7843 - RNA, 21 nt, artificial
  Oligomer
aguuugcuggaaacccuccua

SEQ ID NO: 7844 - RNA, 21 nt, artificial
  Oligomer
ggcugugcauaauauaacagu

SEQ ID NO: 7845 - RNA, 21 nt, artificial
  Oligomer
ucacgcugugccucauauuaa

SEQ ID NO: 7846 - RNA, 21 nt, artificial
  Oligomer
caucacgcugugccucauauu

SEQ ID NO: 7847 - RNA, 21 nt, artificial
  Oligomer
gucaucacgcugugccucaua

SEQ ID NO: 7848 - RNA, 21 nt, artificial
  Oligomer
cgaaagagaauaaagaacccu

SEQ ID NO: 7849 - RNA, 21 nt, artificial
  Oligomer
caauuuugcucgaaagagaau

SEQ ID NO: 7850 - RNA, 21 nt, artificial
  Oligomer
ggcaaaaugaaaguuaucuca

SEQ ID NO: 7851 - RNA, 21 nt, artificial
  Oligomer
ccgagaguguuucuccaaggu

SEQ ID NO: 7852 - RNA, 21 nt, artificial
  Oligomer
agucugagaauauuggcccuu

SEQ ID NO: 7853 - RNA, 21 nt, artificial
  Oligomer
ccucaguuauaaggagucuga

SEQ ID NO: 7854 - RNA, 21 nt, artificial
  Oligomer
gacacuuagguccagccuguu

SEQ ID NO: 7855 - RNA, 21 nt, artificial
  Oligomer
gucacaaauuuugaugcugag

SEQ ID NO: 7856 - RNA, 21 nt, artificial
  Oligomer
guauacacauacugauguugu

SEQ ID NO: 7857 - RNA, 21 nt, artificial
  Oligomer
gguauacacauacugauguug

SEQ ID NO: 7858 - RNA, 21 nt, artificial
  Oligomer
gaaggagguauacacauacug

SEQ ID NO: 7859 - RNA, 21 nt, artificial
  Oligomer
ggcauggaugauugcacuuca

SEQ ID NO: 7860 - RNA, 21 nt, artificial
  Oligomer
agaacucuucaacuucgguaa

SEQ ID NO: 7861 - RNA, 21 nt, artificial
  Oligomer
cucaccuuucauaaaauggug

SEQ ID NO: 7862 - RNA, 21 nt, artificial
  Oligomer
aggaaucucaccuuucauaaa

SEQ ID NO: 7863 - RNA, 21 nt, artificial
  Oligomer
agguggagaauuaaccuccug

SEQ ID NO: 7864 - RNA, 21 nt, artificial
  Oligomer
ggacaggaaucucaccuuuca

SEQ ID NO: 7865 - RNA, 21 nt, artificial
  Oligomer
ggauacuaaccaauaggauug

SEQ ID NO: 7866 - RNA, 21 nt, artificial
  Oligomer
caacacuuauuagugacagua

SEQ ID NO: 7867 - RNA, 21 nt, artificial
  Oligomer
ggaguagcuauauauuucuac

SEQ ID NO: 7868 - RNA, 21 nt, artificial
  Oligomer
cccaucuuacuccagguuuga

SEQ ID NO: 7869 - RNA, 21 nt, artificial
  Oligomer
gucucuuccaugaggaaauaa

SEQ ID NO: 7870 - RNA, 21 nt, artificial
  Oligomer
ccaccaaucugaagcucaaaa

SEQ ID NO: 7871 - RNA, 21 nt, artificial
  Oligomer
gguacaaauauugcaauaacg

SEQ ID NO: 7872 - RNA, 21 nt, artificial
  Oligomer
gucugguacaaauauugcaau

SEQ ID NO: 7873 - RNA, 21 nt, artificial
  Oligomer
ggaaacuaccuaagauagcgg

SEQ ID NO: 7874 - RNA, 21 nt, artificial
  Oligomer
ccauuuuugucauucugguuu

SEQ ID NO: 7875 - RNA, 21 nt, artificial
  Oligomer
cucaguuugcuggaaacccuc

SEQ ID NO: 7876 - RNA, 21 nt, artificial
  Oligomer
ggaaugcccaaucccucaguu

SEQ ID NO: 7877 - RNA, 21 nt, artificial
  Oligomer
cggguuuaugauauuccaccu

SEQ ID NO: 7878 - RNA, 21 nt, artificial
  Oligomer
gucugguauuaccggguuuau

SEQ ID NO: 7879 - RNA, 21 nt, artificial
  Oligomer
uuaguucuucugcuuuugcaa

SEQ ID NO: 7880 - RNA, 21 nt, artificial
  Oligomer
cgagaguguuucuccaagguu

SEQ ID NO: 7881 - RNA, 21 nt, artificial
  Oligomer
ucugagaauauuggcccuuuc

SEQ ID NO: 7882 - RNA, 21 nt, artificial
  Oligomer
gagaggguaccucaguuauaa

SEQ ID NO: 7883 - RNA, 21 nt, artificial
  Oligomer
uggagaggguaccucaguuau

SEQ ID NO: 7884 - RNA, 21 nt, artificial
  Oligomer
caccaaaguaugaacuggaga

SEQ ID NO: 7885 - RNA, 21 nt, artificial
  Oligomer
cuaugagucaggcucuguuua

SEQ ID NO: 7886 - RNA, 21 nt, artificial
  Oligomer
acacugcaccucagguaucaa

SEQ ID NO: 7887 - RNA, 21 nt, artificial
  Oligomer
cacucugcgauucacaccauu

SEQ ID NO: 7888 - RNA, 21 nt, artificial
  Oligomer
gucugacaaauaaggccugcu

SEQ ID NO: 7889 - RNA, 21 nt, artificial
  Oligomer
aggagguauacacauacugau

SEQ ID NO: 7890 - RNA, 21 nt, artificial
  Oligomer
ggaagggcagaagacugguuu

SEQ ID NO: 7891 - RNA, 21 nt, artificial
  Oligomer
gagccacaaauguuuagaacu

SEQ ID NO: 7892 - RNA, 21 nt, artificial
  Oligomer
cacucaauaguauguucugaa

SEQ ID NO: 7893 - RNA, 21 nt, artificial
  Oligomer
agagaucaaauucacacucaa

SEQ ID NO: 7894 - RNA, 21 nt, artificial
  Oligomer
agcccuuaugaauauugaacu

SEQ ID NO: 7895 - RNA, 21 nt, artificial
  Oligomer
agacuaauuuccugcccaaag

SEQ ID NO: 7896 - RNA, 21 nt, artificial
  Oligomer
ugcagacuaauuuccugccca

SEQ ID NO: 7897 - RNA, 21 nt, artificial
  Oligomer
gccugaaggguucugcacauu

SEQ ID NO: 7898 - RNA, 21 nt, artificial
  Oligomer
caggcuaaggauacuaaccaa

SEQ ID NO: 7899 - RNA, 21 nt, artificial
  Oligomer
acugucauagaccaaaggaau

SEQ ID NO: 7900 - RNA, 21 nt, artificial
  Oligomer
agauguucuuucuacagaaga

SEQ ID NO: 7901 - RNA, 21 nt, artificial
  Oligomer
gacaguauugacaucugagca

SEQ ID NO: 7902 - RNA, 21 nt, artificial
  Oligomer
gugacaguauugacaucugag

SEQ ID NO: 7903 - RNA, 21 nt, artificial
  Oligomer
gcugcucaacaagaguucgaa

SEQ ID NO: 7904 - RNA, 21 nt, artificial
  Oligomer
ugauacucuuuccacaauacu

SEQ ID NO: 7905 - RNA, 21 nt, artificial
  Oligomer
gcaucuccaacucugagucug

SEQ ID NO: 7906 - RNA, 21 nt, artificial
  Oligomer
agcaucuccaacucugagucu

SEQ ID NO: 7907 - RNA, 21 nt, artificial
  Oligomer
ugaguaaacaaagcaucucca

SEQ ID NO: 7908 - RNA, 21 nt, artificial
  Oligomer
acccugaguaaacaaagcauc

SEQ ID NO: 7909 - RNA, 21 nt, artificial
  Oligomer
aggccugaaacaaaagacuuu

SEQ ID NO: 7910 - RNA, 21 nt, artificial
  Oligomer
caacugcaugcugauucucuu

SEQ ID NO: 7911 - RNA, 21 nt, artificial
  Oligomer
gagccagaugcaggaaaggaa

SEQ ID NO: 7912 - RNA, 21 nt, artificial
  Oligomer
aaacuaccuaagauagcgguu

SEQ ID NO: 7913 - RNA, 21 nt, artificial
  Oligomer
accaucgagcuacagaugaag

SEQ ID NO: 7914 - RNA, 21 nt, artificial
  Oligomer
ucuguaucucugugagagguu

SEQ ID NO: 7915 - RNA, 21 nt, artificial
  Oligomer
ggauagugggucccauguuuc

SEQ ID NO: 7916 - RNA, 21 nt, artificial
  Oligomer
gguuuaugauauuccaccuaa

SEQ ID NO: 7917 - RNA, 21 nt, artificial
  Oligomer
ccagcuucauuuguugcuccg

SEQ ID NO: 7918 - RNA, 21 nt, artificial
  Oligomer
uggcccuuucuaaccuaugug

SEQ ID NO: 7919 - RNA, 21 nt, artificial
  Oligomer
accucaguuauaaggagucug

SEQ ID NO: 7920 - RNA, 21 nt, artificial
  Oligomer
agucaggcucuguuuauuguu

SEQ ID NO: 7921 - RNA, 21 nt, artificial
  Oligomer
agagacacuuagguccagccu

SEQ ID NO: 7922 - RNA, 21 nt, artificial
  Oligomer
ccaggaugguuucugcuuaga

SEQ ID NO: 7923 - RNA, 21 nt, artificial
  Oligomer
accaggaugguuucugcuuag

SEQ ID NO: 7924 - RNA, 21 nt, artificial
  Oligomer
aacuucgguaaugaggaagaa

SEQ ID NO: 7925 - RNA, 21 nt, artificial
  Oligomer
cugggaacuaaaaccaguuuu

SEQ ID NO: 7926 - RNA, 21 nt, artificial
  Oligomer
cccauuucugggaacuaaaac

SEQ ID NO: 7927 - RNA, 21 nt, artificial
  Oligomer
ucccauuucugggaacuaaaa

SEQ ID NO: 7928 - RNA, 21 nt, artificial
  Oligomer
uguggccaagagcaggguuuu

SEQ ID NO: 7929 - RNA, 21 nt, artificial
  Oligomer
agagagucucuaaaucacugu

SEQ ID NO: 7930 - RNA, 21 nt, artificial
  Oligomer
agagagagucucuaaaucacu

SEQ ID NO: 7931 - RNA, 21 nt, artificial
  Oligomer
gagaucaaauucacacucaau

SEQ ID NO: 7932 - RNA, 21 nt, artificial
  Oligomer
caucugugugacuaaugguuu

SEQ ID NO: 7933 - RNA, 21 nt, artificial
  Oligomer
caaaguggucuucuccagcua

SEQ ID NO: 7934 - RNA, 21 nt, artificial
  Oligomer
ggagaauuaaccuccugccau

SEQ ID NO: 7935 - RNA, 21 nt, artificial
  Oligomer
aggauacuaaccaauaggauu

SEQ ID NO: 7936 - RNA, 21 nt, artificial
  Oligomer
ggcuaaggauacuaaccaaua

SEQ ID NO: 7937 - RNA, 21 nt, artificial
  Oligomer
acaacuggacaggaaucucac

SEQ ID NO: 7938 - RNA, 21 nt, artificial
  Oligomer
agacaacuggacaggaaucuc

SEQ ID NO: 7939 - RNA, 21 nt, artificial
  Oligomer
cuauuacugucauagaccaaa

SEQ ID NO: 7940 - RNA, 21 nt, artificial
  Oligomer
cggauacucaaguaaguuuug

SEQ ID NO: 7941 - RNA, 21 nt, artificial
  Oligomer
agagagcggauacucaaguaa

SEQ ID NO: 7942 - RNA, 21 nt, artificial
  Oligomer
ucaacacuuauuagugacagu

SEQ ID NO: 7943 - RNA, 21 nt, artificial
  Oligomer
gucucaacacuuauuagugac

SEQ ID NO: 7944 - RNA, 21 nt, artificial
  Oligomer
gguucaguaacuucccuaaga

SEQ ID NO: 7945 - RNA, 21 nt, artificial
  Oligomer
gcucuaugguuuugagagcac

SEQ ID NO: 7946 - RNA, 21 nt, artificial
  Oligomer
gcugccaaaugcucaaauaau

SEQ ID NO: 7947 - RNA, 21 nt, artificial
  Oligomer
auguggguugugcugccaaau

SEQ ID NO: 7948 - RNA, 21 nt, artificial
  Oligomer
ugucucuuccaugaggaaaua

SEQ ID NO: 7949 - RNA, 21 nt, artificial
  Oligomer
acaaagcaucuccaacucuga

SEQ ID NO: 7950 - RNA, 21 nt, artificial
  Oligomer
gaauaggaguuuuccucugug

SEQ ID NO: 7951 - RNA, 21 nt, artificial
  Oligomer
ggagaaagaugugaucacagg

SEQ ID NO: 7952 - RNA, 21 nt, artificial
  Oligomer
ugcaccaugaugaggagaaag

SEQ ID NO: 7953 - RNA, 21 nt, artificial
  Oligomer
ccaaucugaagcucaaaaaga

SEQ ID NO: 7954 - RNA, 21 nt, artificial
  Oligomer
cgccaccaaucugaagcucaa

SEQ ID NO: 7955 - RNA, 21 nt, artificial
  Oligomer
acgccaccaaucugaagcuca

SEQ ID NO: 7956 - RNA, 21 nt, artificial
  Oligomer
caaauauugcaauaacgccac

SEQ ID NO: 7957 - RNA, 21 nt, artificial
  Oligomer
ugccugaauuucaacugcaug

SEQ ID NO: 7958 - RNA, 21 nt, artificial
  Oligomer
ccugccugaauuucaacugca

SEQ ID NO: 7959 - RNA, 21 nt, artificial
  Oligomer
guggcugugauaagcaggagu

SEQ ID NO: 7960 - RNA, 21 nt, artificial
  Oligomer
ggcuguucaaugcuuguggcu

SEQ ID NO: 7961 - RNA, 21 nt, artificial
  Oligomer
gaagacuucuuuaguauccau

SEQ ID NO: 7962 - RNA, 21 nt, artificial
  Oligomer
ggaagacuucuuuaguaucca

SEQ ID NO: 7963 - RNA, 21 nt, artificial
  Oligomer
ccaaucccucaguuugcugga

SEQ ID NO: 7964 - RNA, 21 nt, artificial
  Oligomer
uggcugugcauaauauaacag

SEQ ID NO: 7965 - RNA, 21 nt, artificial
  Oligomer
ucaucacgcugugccucauau

SEQ ID NO: 7966 - RNA, 21 nt, artificial
  Oligomer
guuaucucaauuuugcucgaa

SEQ ID NO: 7967 - RNA, 21 nt, artificial
  Oligomer
ucaguagcacucucugaacuu

SEQ ID NO: 7968 - RNA, 21 nt, artificial
  Oligomer
ugcuuuugcaauuguguuugu

SEQ ID NO: 7969 - RNA, 21 nt, artificial
  Oligomer
agaguguuucuccaagguuuu

SEQ ID NO: 7970 - RNA, 21 nt, artificial
  Oligomer
ggcccuuucuaaccuaugugc

SEQ ID NO: 7971 - RNA, 21 nt, artificial
  Oligomer
ggagucugagaauauuggccc

SEQ ID NO: 7972 - RNA, 21 nt, artificial
  Oligomer
ucaguuauaaggagucugaga

SEQ ID NO: 7973 - RNA, 21 nt, artificial
  Oligomer
aggguaccucaguuauaagga

SEQ ID NO: 7974 - RNA, 21 nt, artificial
  Oligomer
agaggguaccucaguuauaag

SEQ ID NO: 7975 - RNA, 21 nt, artificial
  Oligomer
caccucagguaucaauucauc

SEQ ID NO: 7976 - RNA, 21 nt, artificial
  Oligomer
gguuucugcuuagagacacuu

SEQ ID NO: 7977 - RNA, 21 nt, artificial
  Oligomer
ggaugguuucugcuuagagac

SEQ ID NO: 7978 - RNA, 21 nt, artificial
  Oligomer
gaaauguaccaggaugguuuc

SEQ ID NO: 7979 - RNA, 21 nt, artificial
  Oligomer
ugaaauguaccaggaugguuu

SEQ ID NO: 7980 - RNA, 21 nt, artificial
  Oligomer
uggucacaaauuuugaugcug

SEQ ID NO: 7981 - RNA, 21 nt, artificial
  Oligomer
ggucucauauuggucauuccc

SEQ ID NO: 7982 - RNA, 21 nt, artificial
  Oligomer
uucugggaacuaaaaccaguu

SEQ ID NO: 7983 - RNA, 21 nt, artificial
  Oligomer
ugcucccauuucugggaacua

SEQ ID NO: 7984 - RNA, 21 nt, artificial
  Oligomer
uguucuuagaacugcucccau

SEQ ID NO: 7985 - RNA, 21 nt, artificial
  Oligomer
uucaagagagagucucuaaau

SEQ ID NO: 7986 - RNA, 21 nt, artificial
  Oligomer
cucuauacagagaucaaauuc

SEQ ID NO: 7987 - RNA, 21 nt, artificial
  Oligomer
acccagaaacaaaaaucucua

SEQ ID NO: 7988 - RNA, 21 nt, artificial
  Oligomer
ugcuccuugugcuauaaaaua

SEQ ID NO: 7989 - RNA, 21 nt, artificial
  Oligomer
ccaugacucuggcucaucuag

SEQ ID NO: 7990 - RNA, 21 nt, artificial
  Oligomer
uggacaggaaucucaccuuuc

SEQ ID NO: 7991 - RNA, 21 nt, artificial
  Oligomer
cacauucuuauuugaagcaug

SEQ ID NO: 7992 - RNA, 21 nt, artificial
  Oligomer
ccaauaggauugccugaaggg

SEQ ID NO: 7993 - RNA, 21 nt, artificial
  Oligomer
aaggauacuaaccaauaggau

SEQ ID NO: 7994 - RNA, 21 nt, artificial
  Oligomer
ucauagaccaaaggaaucuga

SEQ ID NO: 7995 - RNA, 21 nt, artificial
  Oligomer
ugaaugaauuuagaaccacac

SEQ ID NO: 7996 - RNA, 21 nt, artificial
  Oligomer
cagagagcggauacucaagua

SEQ ID NO: 7997 - RNA, 21 nt, artificial
  Oligomer
guaauacucaucauuuaccac

SEQ ID NO: 7998 - RNA, 21 nt, artificial
  Oligomer
gagagugucucaacacuuauu

SEQ ID NO: 7999 - RNA, 21 nt, artificial
  Oligomer
aggaaaccaaggaguagcuau

SEQ ID NO: 8000 - RNA, 21 nt, artificial
  Oligomer
gagcugccucagaauccucaa

SEQ ID NO: 8001 - RNA, 21 nt, artificial
  Oligomer
cgugcugcucaacaagaguuc

SEQ ID NO: 8002 - RNA, 21 nt, artificial
  Oligomer
gcgugcugcucaacaagaguu

SEQ ID NO: 8003 - RNA, 21 nt, artificial
  Oligomer
uagcccaucuuacuccagguu

SEQ ID NO: 8004 - RNA, 21 nt, artificial
  Oligomer
ucaguaacuucccuaagauua

SEQ ID NO: 8005 - RNA, 21 nt, artificial
  Oligomer
ccuuaaaggaaugucaaagau

SEQ ID NO: 8006 - RNA, 21 nt, artificial
  Oligomer
cccuuaaaggaaugucaaaga

SEQ ID NO: 8007 - RNA, 21 nt, artificial
  Oligomer
ugguuuucccuuaaaggaaug

SEQ ID NO: 8008 - RNA, 21 nt, artificial
  Oligomer
cuauaauguaaugguuuuccc

SEQ ID NO: 8009 - RNA, 21 nt, artificial
  Oligomer
ggaguuuuccucuguggaccu

SEQ ID NO: 8010 - RNA, 21 nt, artificial
  Oligomer
ccuaauaccagaauaggaguu

SEQ ID NO: 8011 - RNA, 21 nt, artificial
  Oligomer
gccugaaacaaaagacuuugu

SEQ ID NO: 8012 - RNA, 21 nt, artificial
  Oligomer
ggccugaaacaaaagacuuug

SEQ ID NO: 8013 - RNA, 21 nt, artificial
  Oligomer
cugaauuucaacugcaugcug

SEQ ID NO: 8014 - RNA, 21 nt, artificial
  Oligomer
accaaucugaagcucaaaaag

SEQ ID NO: 8015 - RNA, 21 nt, artificial
  Oligomer
auagcgguugaugggcccuuu

SEQ ID NO: 8016 - RNA, 21 nt, artificial
  Oligomer
cauuuuugucaagugcccaaa

SEQ ID NO: 8017 - RNA, 21 nt, artificial
  Oligomer
gugggacaauacauuuuuguc

SEQ ID NO: 8018 - RNA, 21 nt, artificial
  Oligomer
gaaagagaauaaagaacccug

SEQ ID NO: 8019 - RNA, 21 nt, artificial
  Oligomer
aggcaaaaugaaaguuaucuc

SEQ ID NO: 8020 - RNA, 21 nt, artificial
  Oligomer
ccgagucaauaauucugaucc

SEQ ID NO: 8021 - RNA, 21 nt, artificial
  Oligomer
gaauggugugugaaugcccga

SEQ ID NO: 8022 - RNA, 21 nt, artificial
  Oligomer
cugcuuuugcaauuguguuug

SEQ ID NO: 8023 - RNA, 21 nt, artificial
  Oligomer
ugagaauauuggcccuuucua

SEQ ID NO: 8024 - RNA, 21 nt, artificial
  Oligomer
cucaguuauaaggagucugag

SEQ ID NO: 8025 - RNA, 21 nt, artificial
  Oligomer
gucaggcucuguuuauuguuu

SEQ ID NO: 8026 - RNA, 21 nt, artificial
  Oligomer
acugcaccucagguaucaauu

SEQ ID NO: 8027 - RNA, 21 nt, artificial
  Oligomer
cugcuuagagacacuuagguc

SEQ ID NO: 8028 - RNA, 21 nt, artificial
  Oligomer
ugguuucugcuuagagacacu

SEQ ID NO: 8029 - RNA, 21 nt, artificial
  Oligomer
ugcacuucacucugcgauuca

SEQ ID NO: 8030 - RNA, 21 nt, artificial
  Oligomer
ucacaaauuuugaugcugagg

SEQ ID NO: 8031 - RNA, 21 nt, artificial
  Oligomer
ggcagaagacugguuuaggag

SEQ ID NO: 8032 - RNA, 21 nt, artificial
  Oligomer
gcucccauuucugggaacuaa

SEQ ID NO: 8033 - RNA, 21 nt, artificial
  Oligomer
ucacacucaauaguauguucu

SEQ ID NO: 8034 - RNA, 21 nt, artificial
  Oligomer
uccuaaaauuaacaacccaga

SEQ ID NO: 8035 - RNA, 21 nt, artificial
  Oligomer
cacaaaauggaucgcaucugu

SEQ ID NO: 8036 - RNA, 21 nt, artificial
  Oligomer
accuuucauaaaaugguggca

SEQ ID NO: 8037 - RNA, 21 nt, artificial
  Oligomer
acacacaaaauggaucgcauc

SEQ ID NO: 8038 - RNA, 21 nt, artificial
  Oligomer
cacacacaaaauggaucgcau

SEQ ID NO: 8039 - RNA, 21 nt, artificial
  Oligomer
cauagaccaaaggaaucugau

SEQ ID NO: 8040 - RNA, 21 nt, artificial
  Oligomer
gauguucuuucuacagaagaa

SEQ ID NO: 8041 - RNA, 21 nt, artificial
  Oligomer
caacaagaguucgaagacaac

SEQ ID NO: 8042 - RNA, 21 nt, artificial
  Oligomer
gcccaucuuacuccagguuug

SEQ ID NO: 8043 - RNA, 21 nt, artificial
  Oligomer
aaagguucaguaacuucccua

SEQ ID NO: 8044 - RNA, 21 nt, artificial
  Oligomer
cucuaugguuuugagagcacu

SEQ ID NO: 8045 - RNA, 21 nt, artificial
  Oligomer
agcucuaugguuuugagagca

SEQ ID NO: 8046 - RNA, 21 nt, artificial
  Oligomer
gguuuucccuuaaaggaaugu

SEQ ID NO: 8047 - RNA, 21 nt, artificial
  Oligomer
ugcugccaaaugcucaaauaa

SEQ ID NO: 8048 - RNA, 21 nt, artificial
  Oligomer
ugugcugccaaaugcucaaau

SEQ ID NO: 8049 - RNA, 21 nt, artificial
  Oligomer
gcugauucucuugccagucug

SEQ ID NO: 8050 - RNA, 21 nt, artificial
  Oligomer
caggccaaucacuuugcugug

SEQ ID NO: 8051 - RNA, 21 nt, artificial
  Oligomer
cacacaugccuuugagugguu

SEQ ID NO: 8052 - RNA, 21 nt, artificial
  Oligomer
gccugccugaauuucaacugc

SEQ ID NO: 8053 - RNA, 21 nt, artificial
  Oligomer
ugcagccugccugaauuucaa

SEQ ID NO: 8054 - RNA, 21 nt, artificial
  Oligomer
cguggaaacuaccuaagauag

SEQ ID NO: 8055 - RNA, 21 nt, artificial
  Oligomer
ucacccuuucaaaaccaucga

SEQ ID NO: 8056 - RNA, 21 nt, artificial
  Oligomer
caagguggucacucacccuuu

SEQ ID NO: 8057 - RNA, 21 nt, artificial
  Oligomer
ggaaauggauaguggguccca

SEQ ID NO: 8058 - RNA, 21 nt, artificial
  Oligomer
cccuccuaugacuuggaaaug

SEQ ID NO: 8059 - RNA, 21 nt, artificial
  Oligomer
acacacaucaucucuuuguga

SEQ ID NO: 8060 - RNA, 21 nt, artificial
  Oligomer
gcuccgagaguguuucuccaa

SEQ ID NO: 8061 - RNA, 21 nt, artificial
  Oligomer
gcgauucacaccauugcacau

SEQ ID NO: 8062 - RNA, 21 nt, artificial
  Oligomer
gcuuagagacacuuaggucca

SEQ ID NO: 8063 - RNA, 21 nt, artificial
  Oligomer
guaccaggaugguuucugcuu

SEQ ID NO: 8064 - RNA, 21 nt, artificial
  Oligomer
agaacucaguuguucuuuguc

SEQ ID NO: 8065 - RNA, 21 nt, artificial
  Oligomer
cacauacugauguuguuuuga

SEQ ID NO: 8066 - RNA, 21 nt, artificial
  Oligomer
acaacccagaaacaaaaaucu

SEQ ID NO: 8067 - RNA, 21 nt, artificial
  Oligomer
acaaaauggaucgcaucugug

SEQ ID NO: 8068 - RNA, 21 nt, artificial
  Oligomer
ugaaggguucugcacauucuu

SEQ ID NO: 8069 - RNA, 21 nt, artificial
  Oligomer
ucuauuacugucauagaccaa

SEQ ID NO: 8070 - RNA, 21 nt, artificial
  Oligomer
ggauacucaaguaaguuuugu

SEQ ID NO: 8071 - RNA, 21 nt, artificial
  Oligomer
cugggccagauguucuuucua

SEQ ID NO: 8072 - RNA, 21 nt, artificial
  Oligomer
acauguugagagugucucaac

SEQ ID NO: 8073 - RNA, 21 nt, artificial
  Oligomer
cugcucaacaagaguucgaag

SEQ ID NO: 8074 - RNA, 21 nt, artificial
  Oligomer
aaccaaggaguagcuauauau

SEQ ID NO: 8075 - RNA, 21 nt, artificial
  Oligomer
cccaaaagaagaaggaaacca

SEQ ID NO: 8076 - RNA, 21 nt, artificial
  Oligomer
uucaguaacuucccuaagauu

SEQ ID NO: 8077 - RNA, 21 nt, artificial
  Oligomer
agguucaguaacuucccuaag

SEQ ID NO: 8078 - RNA, 21 nt, artificial
  Oligomer
aagguucaguaacuucccuaa

SEQ ID NO: 8079 - RNA, 21 nt, artificial
  Oligomer
ccucucaguaaugucagugga

SEQ ID NO: 8080 - RNA, 21 nt, artificial
  Oligomer
ggagcucuaugguuuugagag

SEQ ID NO: 8081 - RNA, 21 nt, artificial
  Oligomer
cugccaaaugcucaaauaaug

SEQ ID NO: 8082 - RNA, 21 nt, artificial
  Oligomer
ggaaaacuucuaacuugucuc

SEQ ID NO: 8083 - RNA, 21 nt, artificial
  Oligomer
cugauucucuugccagucugu

SEQ ID NO: 8084 - RNA, 21 nt, artificial
  Oligomer
gcaccaugaugaggagaaaga

SEQ ID NO: 8085 - RNA, 21 nt, artificial
  Oligomer
acacaugccuuugagugguuu

SEQ ID NO: 8086 - RNA, 21 nt, artificial
  Oligomer
ggacacacaugccuuugagug

SEQ ID NO: 8087 - RNA, 21 nt, artificial
  Oligomer
gcaauaacgccaccaaucuga

SEQ ID NO: 8088 - RNA, 21 nt, artificial
  Oligomer
ccagugaagauguguucagcu

SEQ ID NO: 8089 - RNA, 21 nt, artificial
  Oligomer
accuaaguucuuuuacacaag

SEQ ID NO: 8090 - RNA, 21 nt, artificial
  Oligomer
cacccuuucaaaaccaucgag

SEQ ID NO: 8091 - RNA, 21 nt, artificial
  Oligomer
uccuaugacuuggaaauggau

SEQ ID NO: 8092 - RNA, 21 nt, artificial
  Oligomer
gaaacccuccuaugacuugga

SEQ ID NO: 8093 - RNA, 21 nt, artificial
  Oligomer
ucauuggccuugccauccaug

SEQ ID NO: 8094 - RNA, 21 nt, artificial
  Oligomer
acaucaucucuuugugaucuu

SEQ ID NO: 8095 - RNA, 21 nt, artificial
  Oligomer
cugguauuaccggguuuauga

SEQ ID NO: 8096 - RNA, 21 nt, artificial
  Oligomer
ccaaaguaugaacuggagagg

SEQ ID NO: 8097 - RNA, 21 nt, artificial
  Oligomer
acaccaaaguaugaacuggag

SEQ ID NO: 8098 - RNA, 21 nt, artificial
  Oligomer
ucaggcucuguuuauuguuuc

SEQ ID NO: 8099 - RNA, 21 nt, artificial
  Oligomer
ugagucaggcucuguuuauug

SEQ ID NO: 8100 - RNA, 21 nt, artificial
  Oligomer
gccuuucugaaauguaccagg

SEQ ID NO: 8101 - RNA, 21 nt, artificial
  Oligomer
agccuuucugaaauguaccag

SEQ ID NO: 8102 - RNA, 21 nt, artificial
  Oligomer
ucauacuacuauuccuuucgu

SEQ ID NO: 8103 - RNA, 21 nt, artificial
  Oligomer
cuggucacaaauuuugaugcu

SEQ ID NO: 8104 - RNA, 21 nt, artificial
  Oligomer
ugaaggagguauacacauacu

SEQ ID NO: 8105 - RNA, 21 nt, artificial
  Oligomer
caacuucgguaaugaggaaga

SEQ ID NO: 8106 - RNA, 21 nt, artificial
  Oligomer
gguggcauggaugauugcacu

SEQ ID NO: 8107 - RNA, 21 nt, artificial
  Oligomer
uguuuagaacucuucaacuuc

SEQ ID NO: 8108 - RNA, 21 nt, artificial
  Oligomer
ucacuguuaguguggccaaga

SEQ ID NO: 8109 - RNA, 21 nt, artificial
  Oligomer
agucucuaaaucacuguuagu

SEQ ID NO: 8110 - RNA, 21 nt, artificial
  Oligomer
cacacucaauaguauguucug

SEQ ID NO: 8111 - RNA, 21 nt, artificial
  Oligomer
cagagaucaaauucacacuca

SEQ ID NO: 8112 - RNA, 21 nt, artificial
  Oligomer
acagagaucaaauucacacuc

SEQ ID NO: 8113 - RNA, 21 nt, artificial
  Oligomer
caacccagaaacaaaaaucuc

SEQ ID NO: 8114 - RNA, 21 nt, artificial
  Oligomer
uccguaaauacacacacaaaa

SEQ ID NO: 8115 - RNA, 21 nt, artificial
  Oligomer
ccaaaguggucuucuccagcu

SEQ ID NO: 8116 - RNA, 21 nt, artificial
  Oligomer
gagguggagaauuaaccuccu

SEQ ID NO: 8117 - RNA, 21 nt, artificial
  Oligomer
ugcacauucuuauuugaagca

SEQ ID NO: 8118 - RNA, 21 nt, artificial
  Oligomer
aggcuaaggauacuaaccaau

SEQ ID NO: 8119 - RNA, 21 nt, artificial
  Oligomer
caaaggaaucugauucucccu

SEQ ID NO: 8120 - RNA, 21 nt, artificial
  Oligomer
agaccaaaggaaucugauucu

SEQ ID NO: 8121 - RNA, 21 nt, artificial
  Oligomer
gcagagagcggauacucaagu

SEQ ID NO: 8122 - RNA, 21 nt, artificial
  Oligomer
acaguauugacaucugagcau

SEQ ID NO: 8123 - RNA, 21 nt, artificial
  Oligomer
cacuuauuagugacaguauug

SEQ ID NO: 8124 - RNA, 21 nt, artificial
  Oligomer
cucaacacuuauuagugacag

SEQ ID NO: 8125 - RNA, 21 nt, artificial
  Oligomer
ccacaauacugagcugccuca

SEQ ID NO: 8126 - RNA, 21 nt, artificial
  Oligomer
uggagcucuaugguuuugaga

SEQ ID NO: 8127 - RNA, 21 nt, artificial
  Oligomer
cuaacuugucucuuccaugag

SEQ ID NO: 8128 - RNA, 21 nt, artificial
  Oligomer
caaggaaaacuucuaacuugu

SEQ ID NO: 8129 - RNA, 21 nt, artificial
  Oligomer
acaggccugaaacaaaagacu

SEQ ID NO: 8130 - RNA, 21 nt, artificial
  Oligomer
agccagaugcaggaaaggaac

SEQ ID NO: 8131 - RNA, 21 nt, artificial
  Oligomer
caaucugaagcucaaaaagau

SEQ ID NO: 8132 - RNA, 21 nt, artificial
  Oligomer
ccauucucaagucagucuggu

SEQ ID NO: 8133 - RNA, 21 nt, artificial
  Oligomer
gccagugaagauguguucagc

SEQ ID NO: 8134 - RNA, 21 nt, artificial
  Oligomer
gcacugccagugaagaugugu

SEQ ID NO: 8135 - RNA, 21 nt, artificial
  Oligomer
ugcuuguggcugugauaagca

SEQ ID NO: 8136 - RNA, 21 nt, artificial
  Oligomer
ggaguggcacccuuuuacacu

SEQ ID NO: 8137 - RNA, 21 nt, artificial
  Oligomer
ccuaaguucuuuuacacaaga

SEQ ID NO: 8138 - RNA, 21 nt, artificial
  Oligomer
cuccuaugacuuggaaaugga

SEQ ID NO: 8139 - RNA, 21 nt, artificial
  Oligomer
aaacccuccuaugacuuggaa

SEQ ID NO: 8140 - RNA, 21 nt, artificial
  Oligomer
aucucaauuuugcucgaaaga

SEQ ID NO: 8141 - RNA, 21 nt, artificial
  Oligomer
guguuauccaguuaugagaua

SEQ ID NO: 8142 - RNA, 21 nt, artificial
  Oligomer
caggaugguuucugcuuagag

SEQ ID NO: 8143 - RNA, 21 nt, artificial
  Oligomer
aagaacucaguuguucuuugu

SEQ ID NO: 8144 - RNA, 21 nt, artificial
  Oligomer
ucaacuucgguaaugaggaag

SEQ ID NO: 8145 - RNA, 21 nt, artificial
  Oligomer
ucugggaacuaaaaccaguuu

SEQ ID NO: 8146 - RNA, 21 nt, artificial
  Oligomer
cugcucccauuucugggaacu

SEQ ID NO: 8147 - RNA, 21 nt, artificial
  Oligomer
uuccguaaauacacacacaaa

SEQ ID NO: 8148 - RNA, 21 nt, artificial
  Oligomer
ggagguggagaauuaaccucc

SEQ ID NO: 8149 - RNA, 21 nt, artificial
  Oligomer
cugcacauucuuauuugaagc

SEQ ID NO: 8150 - RNA, 21 nt, artificial
  Oligomer
ggaaucugauucucccuaggg

SEQ ID NO: 8151 - RNA, 21 nt, artificial
  Oligomer
uggcagagagcggauacucaa

SEQ ID NO: 8152 - RNA, 21 nt, artificial
  Oligomer
ccagauguucuuucuacagaa

SEQ ID NO: 8153 - RNA, 21 nt, artificial
  Oligomer
gccagauguucuuucuacaga

SEQ ID NO: 8154 - RNA, 21 nt, artificial
  Oligomer
agugacaguauugacaucuga

SEQ ID NO: 8155 - RNA, 21 nt, artificial
  Oligomer
guugagagugucucaacacuu

SEQ ID NO: 8156 - RNA, 21 nt, artificial
  Oligomer
gcucaacaagaguucgaagac

SEQ ID NO: 8157 - RNA, 21 nt, artificial
  Oligomer
gaaggaaaccaaggaguagcu

SEQ ID NO: 8158 - RNA, 21 nt, artificial
  Oligomer
uccacaauacugagcugccuc

SEQ ID NO: 8159 - RNA, 21 nt, artificial
  Oligomer
cuagcccaucuuacuccaggu

SEQ ID NO: 8160 - RNA, 21 nt, artificial
  Oligomer
ggaaugucaaagauuguuuga

SEQ ID NO: 8161 - RNA, 21 nt, artificial
  Oligomer
acuugucucuuccaugaggaa

SEQ ID NO: 8162 - RNA, 21 nt, artificial
  Oligomer
aggagaaagaugugaucacag

SEQ ID NO: 8163 - RNA, 21 nt, artificial
  Oligomer
ugggaugagucucaggccaau

SEQ ID NO: 8164 - RNA, 21 nt, artificial
  Oligomer
guacaaauauugcaauaacgc

SEQ ID NO: 8165 - RNA, 21 nt, artificial
  Oligomer
agugaagauguguucagcuau

SEQ ID NO: 8166 - RNA, 21 nt, artificial
  Oligomer
uggucacucacccuuucaaaa

SEQ ID NO: 8167 - RNA, 21 nt, artificial
  Oligomer
agguggucacucacccuuuca

SEQ ID NO: 8168 - RNA, 21 nt, artificial
  Oligomer
acccuccuaugacuuggaaau

SEQ ID NO: 8169 - RNA, 21 nt, artificial
  Oligomer
aacccuccuaugacuuggaaa

SEQ ID NO: 8170 - RNA, 21 nt, artificial
  Oligomer
caggcaucacuggaguuguca

SEQ ID NO: 8171 - RNA, 21 nt, artificial
  Oligomer
cucaauuuugcucgaaagaga

SEQ ID NO: 8172 - RNA, 21 nt, artificial
  Oligomer
gucauacuacuauuccuuucg

SEQ ID NO: 8173 - RNA, 21 nt, artificial
  Oligomer
gggcagaagacugguuuagga

SEQ ID NO: 8174 - RNA, 21 nt, artificial
  Oligomer
cuaaaaccaguuuuauuugcc

SEQ ID NO: 8175 - RNA, 21 nt, artificial
  Oligomer
gaucaaauucacacucaauag

SEQ ID NO: 8176 - RNA, 21 nt, artificial
  Oligomer
acacacacaaaauggaucgca

SEQ ID NO: 8177 - RNA, 21 nt, artificial
  Oligomer
uggagaauuaaccuccugcca

SEQ ID NO: 8178 - RNA, 21 nt, artificial
  Oligomer
ugccugaaggguucugcacau

SEQ ID NO: 8179 - RNA, 21 nt, artificial
  Oligomer
cuaagaacaaaaagaaaaccc

SEQ ID NO: 8180 - RNA, 21 nt, artificial
  Oligomer
aagaacaaaaagaaaacccug

SEQ ID NO: 8181 - RNA, 21 nt, artificial
  Oligomer
uuguuuacucaggguuucagc

SEQ ID NO: 8182 - RNA, 21 nt, artificial
  Oligomer
uugucuugaauucauuauccc

SEQ ID NO: 8183 - RNA, 21 nt, artificial
  Oligomer
auuucagaaaggcuauauucg

SEQ ID NO: 8184 - RNA, 21 nt, artificial
  Oligomer
aagaguucuaaacauuugugg

SEQ ID NO: 8185 - RNA, 21 nt, artificial
  Oligomer
aaguucaauauucauaagggc

SEQ ID NO: 8186 - RNA, 21 nt, artificial
  Oligomer
uugaauucauuaucccaguug

SEQ ID NO: 8187 - RNA, 21 nt, artificial
  Oligomer
uuucagaaaggcuauauucgc

SEQ ID NO: 8188 - RNA, 21 nt, artificial
  Oligomer
ugaauucauuaucccaguugg

SEQ ID NO: 8189 - RNA, 21 nt, artificial
  Oligomer
auaauuaauaugaggcacagc

SEQ ID NO: 8190 - RNA, 21 nt, artificial
  Oligomer
ugaagcugguuuuaauuaugc

SEQ ID NO: 8191 - RNA, 21 nt, artificial
  Oligomer
uucucuuuucuccuuauuucc

SEQ ID NO: 8192 - RNA, 21 nt, artificial
  Oligomer
uaucuuggcauugugugguuc

SEQ ID NO: 8193 - RNA, 21 nt, artificial
  Oligomer
uucugguauuaggguguugac

SEQ ID NO: 8194 - RNA, 21 nt, artificial
  Oligomer
gugauaauuaauaugaggcac

SEQ ID NO: 8195 - RNA, 21 nt, artificial
  Oligomer
uuauucacauacaaagccugc

SEQ ID NO: 8196 - RNA, 21 nt, artificial
  Oligomer
ucaaacuuuaagaaaucuggg

SEQ ID NO: 8197 - RNA, 21 nt, artificial
  Oligomer
uucuaucuuggcauugugugg

SEQ ID NO: 8198 - RNA, 21 nt, artificial
  Oligomer
aucuuggcauugugugguucu

SEQ ID NO: 8199 - RNA, 21 nt, artificial
  Oligomer
uugguuuccuucuucuuuugg

SEQ ID NO: 8200 - RNA, 21 nt, artificial
  Oligomer
aauuaauaugaggcacagcgu

SEQ ID NO: 8201 - RNA, 21 nt, artificial
  Oligomer
auaguugagcacaguuuuaag

SEQ ID NO: 8202 - RNA, 21 nt, artificial
  Oligomer
gagcacaguuuuaagaauucc

SEQ ID NO: 8203 - RNA, 21 nt, artificial
  Oligomer
gaauagaugaauugauaccug

SEQ ID NO: 8204 - RNA, 21 nt, artificial
  Oligomer
auagaugaauugauaccugag

SEQ ID NO: 8205 - RNA, 21 nt, artificial
  Oligomer
cauuucagaaaggcuauauuc

SEQ ID NO: 8206 - RNA, 21 nt, artificial
  Oligomer
uauuuaguucauccuaguccc

SEQ ID NO: 8207 - RNA, 21 nt, artificial
  Oligomer
uuucuccuuauuuccuuuucc

SEQ ID NO: 8208 - RNA, 21 nt, artificial
  Oligomer
guucuaaacauuuguggcucc

SEQ ID NO: 8209 - RNA, 21 nt, artificial
  Oligomer
aacaaaaagaaaacccugcuc

SEQ ID NO: 8210 - RNA, 21 nt, artificial
  Oligomer
aauaaaccauuagucacacag

SEQ ID NO: 8211 - RNA, 21 nt, artificial
  Oligomer
auugaaacaauaaacagagcc

SEQ ID NO: 8212 - RNA, 21 nt, artificial
  Oligomer
uaguaugacaaagaacaacug

SEQ ID NO: 8213 - RNA, 21 nt, artificial
  Oligomer
uuuuauuuucucucacucucc

SEQ ID NO: 8214 - RNA, 21 nt, artificial
  Oligomer
agaguucuaaacauuuguggc

SEQ ID NO: 8215 - RNA, 21 nt, artificial
  Oligomer
agaacaaaaagaaaacccugc

SEQ ID NO: 8216 - RNA, 21 nt, artificial
  Oligomer
aaaagaaaacccugcucuugg

SEQ ID NO: 8217 - RNA, 21 nt, artificial
  Oligomer
aauucuaucuuggcauugugu

SEQ ID NO: 8218 - RNA, 21 nt, artificial
  Oligomer
uacauuaacuccaaucaaucc

SEQ ID NO: 8219 - RNA, 21 nt, artificial
  Oligomer
uuuguuuacucaggguuucag

SEQ ID NO: 8220 - RNA, 21 nt, artificial
  Oligomer
ugucuugaauucauuauccca

SEQ ID NO: 8221 - RNA, 21 nt, artificial
  Oligomer
uaauuaauaugaggcacagcg

SEQ ID NO: 8222 - RNA, 21 nt, artificial
  Oligomer
aucagaauuauugacucgggc

SEQ ID NO: 8223 - RNA, 21 nt, artificial
  Oligomer
agcacaguuuuaagaauuccc

SEQ ID NO: 8224 - RNA, 21 nt, artificial
  Oligomer
cuacuuucauaacuuaguugg

SEQ ID NO: 8225 - RNA, 21 nt, artificial
  Oligomer
uuaugcacauagguuagaaag

SEQ ID NO: 8226 - RNA, 21 nt, artificial
  Oligomer
augcacauagguuagaaaggg

SEQ ID NO: 8227 - RNA, 21 nt, artificial
  Oligomer
auucucagacuccuuauaacu

SEQ ID NO: 8228 - RNA, 21 nt, artificial
  Oligomer
aguaugacaaagaacaacuga

SEQ ID NO: 8229 - RNA, 21 nt, artificial
  Oligomer
uucuaaacauuuguggcucca

SEQ ID NO: 8230 - RNA, 21 nt, artificial
  Oligomer
auccaugccaccauuuuauga

SEQ ID NO: 8231 - RNA, 21 nt, artificial
  Oligomer
caaauaaaccauuagucacac

SEQ ID NO: 8232 - RNA, 21 nt, artificial
  Oligomer
auaaaccauuagucacacaga

SEQ ID NO: 8233 - RNA, 21 nt, artificial
  Oligomer
uaauucuaucuuggcauugug

SEQ ID NO: 8234 - RNA, 21 nt, artificial
  Oligomer
auuuugaggauucugaggcag

SEQ ID NO: 8235 - RNA, 21 nt, artificial
  Oligomer
uuguggaaagaguaucaaacc

SEQ ID NO: 8236 - RNA, 21 nt, artificial
  Oligomer
auugaguccaagaaucuuuuc

SEQ ID NO: 8237 - RNA, 21 nt, artificial
  Oligomer
uuggagaugcuuuguuuacuc

SEQ ID NO: 8238 - RNA, 21 nt, artificial
  Oligomer
uuccacgcaucuugaaacucc

SEQ ID NO: 8239 - RNA, 21 nt, artificial
  Oligomer
aaaaauguauugucccacuuc

SEQ ID NO: 8240 - RNA, 21 nt, artificial
  Oligomer
aaaagacuucaaaguaagacc

SEQ ID NO: 8241 - RNA, 21 nt, artificial
  Oligomer
aaagacuucaaaguaagaccu

SEQ ID NO: 8242 - RNA, 21 nt, artificial
  Oligomer
aagacuucaaaguaagaccuc

SEQ ID NO: 8243 - RNA, 21 nt, artificial
  Oligomer
acuucaaaguaagaccuccgg

SEQ ID NO: 8244 - RNA, 21 nt, artificial
  Oligomer
caaaguaagaccuccggaugg

SEQ ID NO: 8245 - RNA, 21 nt, artificial
  Oligomer
ugguggaggaagugauaauua

SEQ ID NO: 8246 - RNA, 21 nt, artificial
  Oligomer
gauaauuaauaugaggcacag

SEQ ID NO: 8247 - RNA, 21 nt, artificial
  Oligomer
ugcacauagguuagaaagggc

SEQ ID NO: 8248 - RNA, 21 nt, artificial
  Oligomer
gaguucuuauuuaguucaucc

SEQ ID NO: 8249 - RNA, 21 nt, artificial
  Oligomer
uuauuuaguucauccuagucc

SEQ ID NO: 8250 - RNA, 21 nt, artificial
  Oligomer
auuuaguucauccuagucccu

SEQ ID NO: 8251 - RNA, 21 nt, artificial
  Oligomer
acaaaaagaaaacccugcucu

SEQ ID NO: 8252 - RNA, 21 nt, artificial
  Oligomer
aaaaagaaaacccugcucuug

SEQ ID NO: 8253 - RNA, 21 nt, artificial
  Oligomer
uaacagugauuuagagacucu

SEQ ID NO: 8254 - RNA, 21 nt, artificial
  Oligomer
uucaauauucauaagggcuag

SEQ ID NO: 8255 - RNA, 21 nt, artificial
  Oligomer
auauucauaagggcuagcugg

SEQ ID NO: 8256 - RNA, 21 nt, artificial
  Oligomer
acuuugggcaggaaauuaguc

SEQ ID NO: 8257 - RNA, 21 nt, artificial
  Oligomer
uccaacccucuuuuuucaugc

SEQ ID NO: 8258 - RNA, 21 nt, artificial
  Oligomer
cauugugugguucuaaauuca

SEQ ID NO: 8259 - RNA, 21 nt, artificial
  Oligomer
cacucucaacauguauuaugu

SEQ ID NO: 8260 - RNA, 21 nt, artificial
  Oligomer
ccuaaugaucuggaaaauuuc

SEQ ID NO: 8261 - RNA, 21 nt, artificial
  Oligomer
uggaaagaguaucaaaccugg

SEQ ID NO: 8262 - RNA, 21 nt, artificial
  Oligomer
uccuuguugaaaaugaaaugc

SEQ ID NO: 8263 - RNA, 21 nt, artificial
  Oligomer
cuugcaauugucuugaauuca

SEQ ID NO: 8264 - RNA, 21 nt, artificial
  Oligomer
aagccggcauuguuccuuucc

SEQ ID NO: 8265 - RNA, 21 nt, artificial
  Oligomer
uauuuguaccagacugacuug

SEQ ID NO: 8266 - RNA, 21 nt, artificial
  Oligomer
uuuccacgcaucuugaaacuc

SEQ ID NO: 8267 - RNA, 21 nt, artificial
  Oligomer
aaaauguauugucccacuucc

SEQ ID NO: 8268 - RNA, 21 nt, artificial
  Oligomer
uauuaugcacagccaaacucu

SEQ ID NO: 8269 - RNA, 21 nt, artificial
  Oligomer
auuaauaugaggcacagcgug

SEQ ID NO: 8270 - RNA, 21 nt, artificial
  Oligomer
aauuauugacucgggcauuca

SEQ ID NO: 8271 - RNA, 21 nt, artificial
  Oligomer
uaguugagcacaguuuuaaga

SEQ ID NO: 8272 - RNA, 21 nt, artificial
  Oligomer
aguugagcacaguuuuaagaa

SEQ ID NO: 8273 - RNA, 21 nt, artificial
  Oligomer
ugagcacaguuuuaagaauuc

SEQ ID NO: 8274 - RNA, 21 nt, artificial
  Oligomer
agaguaccuguuaauaaaugc

SEQ ID NO: 8275 - RNA, 21 nt, artificial
  Oligomer
ugacaagcacucuuauauuca

SEQ ID NO: 8276 - RNA, 21 nt, artificial
  Oligomer
cauuaaauagaugugcaaugg

SEQ ID NO: 8277 - RNA, 21 nt, artificial
  Oligomer
uaaauagaugugcaauggugu

SEQ ID NO: 8278 - RNA, 21 nt, artificial
  Oligomer
uaugcacauagguuagaaagg

SEQ ID NO: 8279 - RNA, 21 nt, artificial
  Oligomer
uucucagacuccuuauaacug

SEQ ID NO: 8280 - RNA, 21 nt, artificial
  Oligomer
uagaugaauugauaccugagg

SEQ ID NO: 8281 - RNA, 21 nt, artificial
  Oligomer
uauuugucagaccuacccuca

SEQ ID NO: 8282 - RNA, 21 nt, artificial
  Oligomer
ucacucucccauucucuuuuc

SEQ ID NO: 8283 - RNA, 21 nt, artificial
  Oligomer
auuaccgaaguugaagaguuc

SEQ ID NO: 8284 - RNA, 21 nt, artificial
  Oligomer
uaaacauuuguggcuccaagg

SEQ ID NO: 8285 - RNA, 21 nt, artificial
  Oligomer
gaacaaaaagaaaacccugcu

SEQ ID NO: 8286 - RNA, 21 nt, artificial
  Oligomer
uuugucacaauuccuaaguuc

SEQ ID NO: 8287 - RNA, 21 nt, artificial
  Oligomer
aauauucauaagggcuagcug

SEQ ID NO: 8288 - RNA, 21 nt, artificial
  Oligomer
cacuuugggcaggaaauuagu

SEQ ID NO: 8289 - RNA, 21 nt, artificial
  Oligomer
uuauuuuauagcacaaggagc

SEQ ID NO: 8290 - RNA, 21 nt, artificial
  Oligomer
aaggagcaggacuagaugagc

SEQ ID NO: 8291 - RNA, 21 nt, artificial
  Oligomer
uuaauucuccaccuccaaccc

SEQ ID NO: 8292 - RNA, 21 nt, artificial
  Oligomer
aacccucuuuuuucaugcuuc

SEQ ID NO: 8293 - RNA, 21 nt, artificial
  Oligomer
caguaugauaauaaugauggc

SEQ ID NO: 8294 - RNA, 21 nt, artificial
  Oligomer
uuuugaggauucugaggcagc

SEQ ID NO: 8295 - RNA, 21 nt, artificial
  Oligomer
aguuacugaaccuuuugaucc

SEQ ID NO: 8296 - RNA, 21 nt, artificial
  Oligomer
uugaaaaugaaaugcacuccc

SEQ ID NO: 8297 - RNA, 21 nt, artificial
  Oligomer
aaugacaaaaauggagagccc

SEQ ID NO: 8298 - RNA, 21 nt, artificial
  Oligomer
uucuucuucaucuguagcucg

SEQ ID NO: 8299 - RNA, 21 nt, artificial
  Oligomer
aucuguagcucgaugguuuug

SEQ ID NO: 8300 - RNA, 21 nt, artificial
  Oligomer
gacuucaaaguaagaccuccg

SEQ ID NO: 8301 - RNA, 21 nt, artificial
  Oligomer
cuucaaaguaagaccuccgga

SEQ ID NO: 8302 - RNA, 21 nt, artificial
  Oligomer
auaacuuucauuuugccuguc

SEQ ID NO: 8303 - RNA, 21 nt, artificial
  Oligomer
uaacuuucauuuugccugucu

SEQ ID NO: 8304 - RNA, 21 nt, artificial
  Oligomer
acuuucauuuugccugucucc

SEQ ID NO: 8305 - RNA, 21 nt, artificial
  Oligomer
auuauucacauacaaagccug

SEQ ID NO: 8306 - RNA, 21 nt, artificial
  Oligomer
auauucgcacagcaggccuua

SEQ ID NO: 8307 - RNA, 21 nt, artificial
  Oligomer
uccuagucccuugaauaaucc

SEQ ID NO: 8308 - RNA, 21 nt, artificial
  Oligomer
uuucucucacucucccauucu

SEQ ID NO: 8309 - RNA, 21 nt, artificial
  Oligomer
cacucucccauucucuuuucu

SEQ ID NO: 8310 - RNA, 21 nt, artificial
  Oligomer
uuucuccuucuuccucauuac

SEQ ID NO: 8311 - RNA, 21 nt, artificial
  Oligomer
uucuccuucuuccucauuacc

SEQ ID NO: 8312 - RNA, 21 nt, artificial
  Oligomer
gaagaguucuaaacauuugug

SEQ ID NO: 8313 - RNA, 21 nt, artificial
  Oligomer
aaacauuuguggcuccaaggg

SEQ ID NO: 8314 - RNA, 21 nt, artificial
  Oligomer
augccaccauuuuaugaaagg

SEQ ID NO: 8315 - RNA, 21 nt, artificial
  Oligomer
auucuaucuuggcauugugug

SEQ ID NO: 8316 - RNA, 21 nt, artificial
  Oligomer
aucaaaccuggaguaagaugg

SEQ ID NO: 8317 - RNA, 21 nt, artificial
  Oligomer
aaguuacugaaccuuuugauc

SEQ ID NO: 8318 - RNA, 21 nt, artificial
  Oligomer
uugaguccaagaaucuuuucc

SEQ ID NO: 8319 - RNA, 21 nt, artificial
  Oligomer
auuucgacagacuggcaagag

SEQ ID NO: 8320 - RNA, 21 nt, artificial
  Oligomer
aagugauuggccugagacuca

SEQ ID NO: 8321 - RNA, 21 nt, artificial
  Oligomer
uuguuccuuuccugcaucugg

SEQ ID NO: 8322 - RNA, 21 nt, artificial
  Oligomer
agcaugcaguugaaauucagg

SEQ ID NO: 8323 - RNA, 21 nt, artificial
  Oligomer
auacuaaagaagucuuccuca

SEQ ID NO: 8324 - RNA, 21 nt, artificial
  Oligomer
aaauguauugucccacuucca

SEQ ID NO: 8325 - RNA, 21 nt, artificial
  Oligomer
auugucccacuuccauuuuga

SEQ ID NO: 8326 - RNA, 21 nt, artificial
  Oligomer
uguguaaaagaacuuaggugg

SEQ ID NO: 8327 - RNA, 21 nt, artificial
  Oligomer
aaagagaugauguguguacca

SEQ ID NO: 8328 - RNA, 21 nt, artificial
  Oligomer
gauaacuuucauuuugccugu

SEQ ID NO: 8329 - RNA, 21 nt, artificial
  Oligomer
gaauuauucacauacaaagcc

SEQ ID NO: 8330 - RNA, 21 nt, artificial
  Oligomer
augacaagcacucuuauauuc

SEQ ID NO: 8331 - RNA, 21 nt, artificial
  Oligomer
agaugaauugauaccugaggu

SEQ ID NO: 8332 - RNA, 21 nt, artificial
  Oligomer
acucucccauucucuuuucuc

SEQ ID NO: 8333 - RNA, 21 nt, artificial
  Oligomer
cucucccauucucuuuucucc

SEQ ID NO: 8334 - RNA, 21 nt, artificial
  Oligomer
ucucccauucucuuuucuccu

SEQ ID NO: 8335 - RNA, 21 nt, artificial
  Oligomer
aacagugauuuagagacucuc

SEQ ID NO: 8336 - RNA, 21 nt, artificial
  Oligomer
uuauagcacaaggagcaggac

SEQ ID NO: 8337 - RNA, 21 nt, artificial
  Oligomer
acccucuuuuuucaugcuuca

SEQ ID NO: 8338 - RNA, 21 nt, artificial
  Oligomer
aaauauauagcuacuccuugg

SEQ ID NO: 8339 - RNA, 21 nt, artificial
  Oligomer
gauuuugaggauucugaggca

SEQ ID NO: 8340 - RNA, 21 nt, artificial
  Oligomer
aaagaguaucaaaccuggagu

SEQ ID NO: 8341 - RNA, 21 nt, artificial
  Oligomer
uuuugauccuuucccuuuuga

SEQ ID NO: 8342 - RNA, 21 nt, artificial
  Oligomer
ugaguccaagaaucuuuuccc

SEQ ID NO: 8343 - RNA, 21 nt, artificial
  Oligomer
auagagcuccacauaaaugua

SEQ ID NO: 8344 - RNA, 21 nt, artificial
  Oligomer
uuuguccauuuuuaagcaggg

SEQ ID NO: 8345 - RNA, 21 nt, artificial
  Oligomer
guugaaaaugaaaugcacucc

SEQ ID NO: 8346 - RNA, 21 nt, artificial
  Oligomer
aaagugauuggccugagacuc

SEQ ID NO: 8347 - RNA, 21 nt, artificial
  Oligomer
augucaguguaaaagggugcc

SEQ ID NO: 8348 - RNA, 21 nt, artificial
  Oligomer
uugggcacuugacaaaaaugu

SEQ ID NO: 8349 - RNA, 21 nt, artificial
  Oligomer
uguugagaucgccaaaaccgc

SEQ ID NO: 8350 - RNA, 21 nt, artificial
  Oligomer
acagagauacagaaacauggg

SEQ ID NO: 8351 - RNA, 21 nt, artificial
  Oligomer
agauacagaaacaugggaccc

SEQ ID NO: 8352 - RNA, 21 nt, artificial
  Oligomer
auuuugccugucuccaaguuc

SEQ ID NO: 8353 - RNA, 21 nt, artificial
  Oligomer
uagaauuaucucccagguccc

SEQ ID NO: 8354 - RNA, 21 nt, artificial
  Oligomer
auacaaagccugcaaguauuc

SEQ ID NO: 8355 - RNA, 21 nt, artificial
  Oligomer
cagaagaacuaagaaaaaccu

SEQ ID NO: 8356 - RNA, 21 nt, artificial
  Oligomer
uucaucauucuuagaguaccu

SEQ ID NO: 8357 - RNA, 21 nt, artificial
  Oligomer
acaccauuccacauuaaauag

SEQ ID NO: 8358 - RNA, 21 nt, artificial
  Oligomer
uaccagacaaagaggaagacg

SEQ ID NO: 8359 - RNA, 21 nt, artificial
  Oligomer
cuuaguugguuuugaagauag

SEQ ID NO: 8360 - RNA, 21 nt, artificial
  Oligomer
uugaaacaauaaacagagccu

SEQ ID NO: 8361 - RNA, 21 nt, artificial
  Oligomer
gaaaggcuauauucgcacagc

SEQ ID NO: 8362 - RNA, 21 nt, artificial
  Oligomer
cuauauucgcacagcaggccu

SEQ ID NO: 8363 - RNA, 21 nt, artificial
  Oligomer
uaugacaaagaacaacugagu

SEQ ID NO: 8364 - RNA, 21 nt, artificial
  Oligomer
uaguucauccuagucccuuga

SEQ ID NO: 8365 - RNA, 21 nt, artificial
  Oligomer
uuauuuucucucacucuccca

SEQ ID NO: 8366 - RNA, 21 nt, artificial
  Oligomer
ucucucacucucccauucucu

SEQ ID NO: 8367 - RNA, 21 nt, artificial
  Oligomer
uucuccuuauuuccuuuuccu

SEQ ID NO: 8368 - RNA, 21 nt, artificial
  Oligomer
gugaauuugaucucuguauag

SEQ ID NO: 8369 - RNA, 21 nt, artificial
  Oligomer
ucaauauucauaagggcuagc

SEQ ID NO: 8370 - RNA, 21 nt, artificial
  Oligomer
uaugcucagaugucaauacug

SEQ ID NO: 8371 - RNA, 21 nt, artificial
  Oligomer
aauauauagcuacuccuuggu

SEQ ID NO: 8372 - RNA, 21 nt, artificial
  Oligomer
aaacugauuuugaggauucug

SEQ ID NO: 8373 - RNA, 21 nt, artificial
  Oligomer
auaaucuuagggaaguuacug

SEQ ID NO: 8374 - RNA, 21 nt, artificial
  Oligomer
uuacugaaccuuuugauccuu

SEQ ID NO: 8375 - RNA, 21 nt, artificial
  Oligomer
cugaaccuuuugauccuuucc

SEQ ID NO: 8376 - RNA, 21 nt, artificial
  Oligomer
aagaaucuuuucccuaacuuc

SEQ ID NO: 8377 - RNA, 21 nt, artificial
  Oligomer
uuccacugacauuacugagag

SEQ ID NO: 8378 - RNA, 21 nt, artificial
  Oligomer
aaacuccuauucugguauuag

SEQ ID NO: 8379 - RNA, 21 nt, artificial
  Oligomer
ugauuggccugagacucaucc

SEQ ID NO: 8380 - RNA, 21 nt, artificial
  Oligomer
uucagauugguggcguuauug

SEQ ID NO: 8381 - RNA, 21 nt, artificial
  Oligomer
uugagaauggaugcgaagggu

SEQ ID NO: 8382 - RNA, 21 nt, artificial
  Oligomer
ucccacuuccauuuugaaccc

SEQ ID NO: 8383 - RNA, 21 nt, artificial
  Oligomer
aaaaccgcaccaaccucucac

SEQ ID NO: 8384 - RNA, 21 nt, artificial
  Oligomer
ccauucugagauuuuuuguuc

SEQ ID NO: 8385 - RNA, 21 nt, artificial
  Oligomer
uauauuaugcacagccaaacu

SEQ ID NO: 8386 - RNA, 21 nt, artificial
  Oligomer
uuaugcacagccaaacucucu

SEQ ID NO: 8387 - RNA, 21 nt, artificial
  Oligomer
aaugaagaagaucacaaagag

SEQ ID NO: 8388 - RNA, 21 nt, artificial
  Oligomer
augauguguguaccaaaagac

SEQ ID NO: 8389 - RNA, 21 nt, artificial
  Oligomer
agacuucaaaguaagaccucc

SEQ ID NO: 8390 - RNA, 21 nt, artificial
  Oligomer
ugaugacaacuccagugaugc

SEQ ID NO: 8391 - RNA, 21 nt, artificial
  Oligomer
aacuuucauuuugccugucuc

SEQ ID NO: 8392 - RNA, 21 nt, artificial
  Oligomer
auuauugacucgggcauucac

SEQ ID NO: 8393 - RNA, 21 nt, artificial
  Oligomer
uuugaagauagaaaaccuugg

SEQ ID NO: 8394 - RNA, 21 nt, artificial
  Oligomer
uuagaaagggccaauauucuc

SEQ ID NO: 8395 - RNA, 21 nt, artificial
  Oligomer
cuuauuugucagaccuacccu

SEQ ID NO: 8396 - RNA, 21 nt, artificial
  Oligomer
cuuauuuaguucauccuaguc

SEQ ID NO: 8397 - RNA, 21 nt, artificial
  Oligomer
uuuauuuucucucacucuccc

SEQ ID NO: 8398 - RNA, 21 nt, artificial
  Oligomer
cuaacagugauuuagagacuc

SEQ ID NO: 8399 - RNA, 21 nt, artificial
  Oligomer
cucucucuugaacauauauuc

SEQ ID NO: 8400 - RNA, 21 nt, artificial
  Oligomer
acaaaugaccauaucagauac

SEQ ID NO: 8401 - RNA, 21 nt, artificial
  Oligomer
uugucacaauuccuaaguuca

SEQ ID NO: 8402 - RNA, 21 nt, artificial
  Oligomer
aauaagaaugugcagaacccu

SEQ ID NO: 8403 - RNA, 21 nt, artificial
  Oligomer
caauccaauauucuucuguag

SEQ ID NO: 8404 - RNA, 21 nt, artificial
  Oligomer
ugauuuugaggauucugaggc

SEQ ID NO: 8405 - RNA, 21 nt, artificial
  Oligomer
aagaguaucaaaccuggagua

SEQ ID NO: 8406 - RNA, 21 nt, artificial
  Oligomer
cacaguuucauaaucuuaggg

SEQ ID NO: 8407 - RNA, 21 nt, artificial
  Oligomer
ucauaaucuuagggaaguuac

SEQ ID NO: 8408 - RNA, 21 nt, artificial
  Oligomer
gaguccaagaaucuuuucccu

SEQ ID NO: 8409 - RNA, 21 nt, artificial
  Oligomer
cuuuucccuaacuuccacuga

SEQ ID NO: 8410 - RNA, 21 nt, artificial
  Oligomer
auguuuguaaaagugcucuca

SEQ ID NO: 8411 - RNA, 21 nt, artificial
  Oligomer
aagugcucucaaaaccauaga

SEQ ID NO: 8412 - RNA, 21 nt, artificial
  Oligomer
agcacaacccacauuuauuuc

SEQ ID NO: 8413 - RNA, 21 nt, artificial
  Oligomer
cuuguugaaaaugaaaugcac

SEQ ID NO: 8414 - RNA, 21 nt, artificial
  Oligomer
uuuguuucaggccugugauca

SEQ ID NO: 8415 - RNA, 21 nt, artificial
  Oligomer
aucacaucuuucuccucauca

SEQ ID NO: 8416 - RNA, 21 nt, artificial
  Oligomer
auuguuccuuuccugcaucug

SEQ ID NO: 8417 - RNA, 21 nt, artificial
  Oligomer
gacugacuugagaauggaugc

SEQ ID NO: 8418 - RNA, 21 nt, artificial
  Oligomer
cacgcaucuugaaacuccugc

SEQ ID NO: 8419 - RNA, 21 nt, artificial
  Oligomer
gaugucaguguaaaagggugc

SEQ ID NO: 8420 - RNA, 21 nt, artificial
  Oligomer
uauugucccacuuccauuuug

SEQ ID NO: 8421 - RNA, 21 nt, artificial
  Oligomer
augguuuugaaagggugagug

SEQ ID NO: 8422 - RNA, 21 nt, artificial
  Oligomer
ugguuuugaaagggugaguga

SEQ ID NO: 8423 - RNA, 21 nt, artificial
  Oligomer
guguaaaagaacuuaggugga

SEQ ID NO: 8424 - RNA, 21 nt, artificial
  Oligomer
ucuguugagaucgccaaaacc

SEQ ID NO: 8425 - RNA, 21 nt, artificial
  Oligomer
cuguugagaucgccaaaaccg

SEQ ID NO: 8426 - RNA, 21 nt, artificial
  Oligomer
aaaccgcaccaaccucucaca

SEQ ID NO: 8427 - RNA, 21 nt, artificial
  Oligomer
aaggccaaugaagaagaucac

SEQ ID NO: 8428 - RNA, 21 nt, artificial
  Oligomer
caaagagaugauguguguacc

SEQ ID NO: 8429 - RNA, 21 nt, artificial
  Oligomer
uuugccugucuccaaguucag

SEQ ID NO: 8430 - RNA, 21 nt, artificial
  Oligomer
caaaagcagaagaacuaagaa

SEQ ID NO: 8431 - RNA, 21 nt, artificial
  Oligomer
gaguaccuguuaauaaaugcu

SEQ ID NO: 8432 - RNA, 21 nt, artificial
  Oligomer
cucucuacuuucauaacuuag

SEQ ID NO: 8433 - RNA, 21 nt, artificial
  Oligomer
uugaagauagaaaaccuugga

SEQ ID NO: 8434 - RNA, 21 nt, artificial
  Oligomer
uuaaauagaugugcaauggug

SEQ ID NO: 8435 - RNA, 21 nt, artificial
  Oligomer
uuauuugucagaccuacccuc

SEQ ID NO: 8436 - RNA, 21 nt, artificial
  Oligomer
augacaaagaacaacugaguu

SEQ ID NO: 8437 - RNA, 21 nt, artificial
  Oligomer
uggguuguuaauuuuaggaug

SEQ ID NO: 8438 - RNA, 21 nt, artificial
  Oligomer
caauauucauaagggcuagcu

SEQ ID NO: 8439 - RNA, 21 nt, artificial
  Oligomer
aaauaagaaugugcagaaccc

SEQ ID NO: 8440 - RNA, 21 nt, artificial
  Oligomer
auuccuguccaguugucuucg

SEQ ID NO: 8441 - RNA, 21 nt, artificial
  Oligomer
aagcacagugguaaaugauga

SEQ ID NO: 8442 - RNA, 21 nt, artificial
  Oligomer
augaucuggaaaauuuccuuc

SEQ ID NO: 8443 - RNA, 21 nt, artificial
  Oligomer
uaaugauggcaaaaaugacac

SEQ ID NO: 8444 - RNA, 21 nt, artificial
  Oligomer
cuugguuuccuucuucuuuug

SEQ ID NO: 8445 - RNA, 21 nt, artificial
  Oligomer
guggaaagaguaucaaaccug

SEQ ID NO: 8446 - RNA, 21 nt, artificial
  Oligomer
ucacaguuucauaaucuuagg

SEQ ID NO: 8447 - RNA, 21 nt, artificial
  Oligomer
uacugaaccuuuugauccuuu

SEQ ID NO: 8448 - RNA, 21 nt, artificial
  Oligomer
cuuuugauccuuucccuuuug

SEQ ID NO: 8449 - RNA, 21 nt, artificial
  Oligomer
agaaucuuuucccuaacuucc

SEQ ID NO: 8450 - RNA, 21 nt, artificial
  Oligomer
uaacuuccacugacauuacug

SEQ ID NO: 8451 - RNA, 21 nt, artificial
  Oligomer
aauguuuguaaaagugcucuc

SEQ ID NO: 8452 - RNA, 21 nt, artificial
  Oligomer
uagagcuccacauaaauguaa

SEQ ID NO: 8453 - RNA, 21 nt, artificial
  Oligomer
uuuuguccauuuuuaagcagg

SEQ ID NO: 8454 - RNA, 21 nt, artificial
  Oligomer
gaaugacaaaaauggagagcc

SEQ ID NO: 8455 - RNA, 21 nt, artificial
  Oligomer
uuguuucaggccugugaucac

SEQ ID NO: 8456 - RNA, 21 nt, artificial
  Oligomer
uaccagacugacuugagaaug

SEQ ID NO: 8457 - RNA, 21 nt, artificial
  Oligomer
ugagaauggaugcgaagggug

SEQ ID NO: 8458 - RNA, 21 nt, artificial
  Oligomer
uaacaucaccaccucauagcu

SEQ ID NO: 8459 - RNA, 21 nt, artificial
  Oligomer
acuaaagaagucuuccucagg

SEQ ID NO: 8460 - RNA, 21 nt, artificial
  Oligomer
aagaacuuagguggaauauca

SEQ ID NO: 8461 - RNA, 21 nt, artificial
  Oligomer
auauuaugcacagccaaacuc

SEQ ID NO: 8462 - RNA, 21 nt, artificial
  Oligomer
auuaugcacagccaaacucuc

SEQ ID NO: 8463 - RNA, 21 nt, artificial
  Oligomer
guggaauaucauaaacccggu

SEQ ID NO: 8464 - RNA, 21 nt, artificial
  Oligomer
augaagaagaucacaaagaga

SEQ ID NO: 8465 - RNA, 21 nt, artificial
  Oligomer
aagaagaucacaaagagauga

SEQ ID NO: 8466 - RNA, 21 nt, artificial
  Oligomer
uguguguaccaaaagacuuca

SEQ ID NO: 8467 - RNA, 21 nt, artificial
  Oligomer
augguuuugguggaggaagug

SEQ ID NO: 8468 - RNA, 21 nt, artificial
  Oligomer
agagagugcuacugaauaagg

SEQ ID NO: 8469 - RNA, 21 nt, artificial
  Oligomer
uauugacucgggcauucacac

SEQ ID NO: 8470 - RNA, 21 nt, artificial
  Oligomer
auaccagacaaagaggaagac

SEQ ID NO: 8471 - RNA, 21 nt, artificial
  Oligomer
auucacauacaaagccugcaa

SEQ ID NO: 8472 - RNA, 21 nt, artificial
  Oligomer
uucacauacaaagccugcaag

SEQ ID NO: 8473 - RNA, 21 nt, artificial
  Oligomer
acaaugcuucaucauucuuag

SEQ ID NO: 8474 - RNA, 21 nt, artificial
  Oligomer
guggcuugagagauaaaaagg

SEQ ID NO: 8475 - RNA, 21 nt, artificial
  Oligomer
uagaaaaccuuggagaaacac

SEQ ID NO: 8476 - RNA, 21 nt, artificial
  Oligomer
aaauagaugugcaauggugug

SEQ ID NO: 8477 - RNA, 21 nt, artificial
  Oligomer
ugaaacaauaaacagagccug

SEQ ID NO: 8478 - RNA, 21 nt, artificial
  Oligomer
ccugacucauaguaauaacac

SEQ ID NO: 8479 - RNA, 21 nt, artificial
  Oligomer
uaagugucucuaagcagaaac

SEQ ID NO: 8480 - RNA, 21 nt, artificial
  Oligomer
uugucagaccuacccucagug

SEQ ID NO: 8481 - RNA, 21 nt, artificial
  Oligomer
agaaugacaaaaauggagagc

SEQ ID NO: 8482 - RNA, 21 nt, artificial
  Oligomer
ccuagucccuugaauaauccc

SEQ ID NO: 8483 - RNA, 21 nt, artificial
  Oligomer
uuccuuuuccuccuaaaccag

SEQ ID NO: 8484 - RNA, 21 nt, artificial
  Oligomer
ucuccuucuuccucauuaccg

SEQ ID NO: 8485 - RNA, 21 nt, artificial
  Oligomer
uguauuuacggaaaauaaggg

SEQ ID NO: 8486 - RNA, 21 nt, artificial
  Oligomer
uaauucuccaccuccaacccu

SEQ ID NO: 8487 - RNA, 21 nt, artificial
  Oligomer
auucuccaccuccaacccucu

SEQ ID NO: 8488 - RNA, 21 nt, artificial
  Oligomer
auccuuagccuguucuugacc

SEQ ID NO: 8489 - RNA, 21 nt, artificial
  Oligomer
uguccaguugucuucgaacuc

SEQ ID NO: 8490 - RNA, 21 nt, artificial
  Oligomer
uacuccuugguuuccuucuuc

SEQ ID NO: 8491 - RNA, 21 nt, artificial
  Oligomer
acugauuuugaggauucugag

SEQ ID NO: 8492 - RNA, 21 nt, artificial
  Oligomer
aaggacagcagauuucgacag

SEQ ID NO: 8493 - RNA, 21 nt, artificial
  Oligomer
aaagugcucucaaaaccauag

SEQ ID NO: 8494 - RNA, 21 nt, artificial
  Oligomer
cucaaaaccauagagcuccac

SEQ ID NO: 8495 - RNA, 21 nt, artificial
  Oligomer
cacaacccacauuuauuuccu

SEQ ID NO: 8496 - RNA, 21 nt, artificial
  Oligomer
acaacccacauuuauuuccuc

SEQ ID NO: 8497 - RNA, 21 nt, artificial
  Oligomer
caacccacauuuauuuccuca

SEQ ID NO: 8498 - RNA, 21 nt, artificial
  Oligomer
cccacauuuauuuccucaugg

SEQ ID NO: 8499 - RNA, 21 nt, artificial
  Oligomer
guuucagccaaggcuucaggu

SEQ ID NO: 8500 - RNA, 21 nt, artificial
  Oligomer
ugugaucacaucuuucuccuc

SEQ ID NO: 8501 - RNA, 21 nt, artificial
  Oligomer
acaucuuucuccucaucaugg

SEQ ID NO: 8502 - RNA, 21 nt, artificial
  Oligomer
gaagccggcauuguuccuuuc

SEQ ID NO: 8503 - RNA, 21 nt, artificial
  Oligomer
uguuccuuuccugcaucuggc

SEQ ID NO: 8504 - RNA, 21 nt, artificial
  Oligomer
caauauuuguaccagacugac

SEQ ID NO: 8505 - RNA, 21 nt, artificial
  Oligomer
caaaccagaaugacaaaaaug

SEQ ID NO: 8506 - RNA, 21 nt, artificial
  Oligomer
ucauagcugaacacaucuuca

SEQ ID NO: 8507 - RNA, 21 nt, artificial
  Oligomer
aucuuagguaguuuccacgca

SEQ ID NO: 8508 - RNA, 21 nt, artificial
  Oligomer
guauugucccacuuccauuuu

SEQ ID NO: 8509 - RNA, 21 nt, artificial
  Oligomer
uucuguugagaucgccaaaac

SEQ ID NO: 8510 - RNA, 21 nt, artificial
  Oligomer
auacagaaacaugggacccac

SEQ ID NO: 8511 - RNA, 21 nt, artificial
  Oligomer
cagaaugacaaaaauggagag

SEQ ID NO: 8512 - RNA, 21 nt, artificial
  Oligomer
agugcuacugaauaaggauca

SEQ ID NO: 8513 - RNA, 21 nt, artificial
  Oligomer
ucagaauuauugacucgggca

SEQ ID NO: 8514 - RNA, 21 nt, artificial
  Oligomer
uauucacauacaaagccugca

SEQ ID NO: 8515 - RNA, 21 nt, artificial
  Oligomer
uacaaagccugcaaguauuca

SEQ ID NO: 8516 - RNA, 21 nt, artificial
  Oligomer
aaugcuucaucauucuuagag

SEQ ID NO: 8517 - RNA, 21 nt, artificial
  Oligomer
augcuucaucauucuuagagu

SEQ ID NO: 8518 - RNA, 21 nt, artificial
  Oligomer
caucauucuuagaguaccugu

SEQ ID NO: 8519 - RNA, 21 nt, artificial
  Oligomer
aucucauaacuggauaacaca

SEQ ID NO: 8520 - RNA, 21 nt, artificial
  Oligomer
ucucggagcaacaaaugaagc

SEQ ID NO: 8521 - RNA, 21 nt, artificial
  Oligomer
aauagaugugcaaugguguga

SEQ ID NO: 8522 - RNA, 21 nt, artificial
  Oligomer
uuaguucauccuagucccuug

SEQ ID NO: 8523 - RNA, 21 nt, artificial
  Oligomer
uuuucucucacucucccauuc

SEQ ID NO: 8524 - RNA, 21 nt, artificial
  Oligomer
ucuccuuauuuccuuuuccuc

SEQ ID NO: 8525 - RNA, 21 nt, artificial
  Oligomer
cuccuuauuuccuuuuccucc

SEQ ID NO: 8526 - RNA, 21 nt, artificial
  Oligomer
uuuccuccuaaaccagucuuc

SEQ ID NO: 8527 - RNA, 21 nt, artificial
  Oligomer
cucauuaccgaaguugaagag

SEQ ID NO: 8528 - RNA, 21 nt, artificial
  Oligomer
ucauuaccgaaguugaagagu

SEQ ID NO: 8529 - RNA, 21 nt, artificial
  Oligomer
caaaugaccauaucagauaca

SEQ ID NO: 8530 - RNA, 21 nt, artificial
  Oligomer
uauucauaagggcuagcugga

SEQ ID NO: 8531 - RNA, 21 nt, artificial
  Oligomer
auucauaagggcuagcuggag

SEQ ID NO: 8532 - RNA, 21 nt, artificial
  Oligomer
caaauaagaaugugcagaacc

SEQ ID NO: 8533 - RNA, 21 nt, artificial
  Oligomer
agcacagugguaaaugaugag

SEQ ID NO: 8534 - RNA, 21 nt, artificial
  Oligomer
acagugguaaaugaugaguau

SEQ ID NO: 8535 - RNA, 21 nt, artificial
  Oligomer
acuccaaucaauccaauauuc

SEQ ID NO: 8536 - RNA, 21 nt, artificial
  Oligomer
cuccaaucaauccaauauucu

SEQ ID NO: 8537 - RNA, 21 nt, artificial
  Oligomer
uauuaguaaacuggaguaugc

SEQ ID NO: 8538 - RNA, 21 nt, artificial
  Oligomer
uauuauguccuaaugaucugg

SEQ ID NO: 8539 - RNA, 21 nt, artificial
  Oligomer
aaugauggcaaaaaugacaca

SEQ ID NO: 8540 - RNA, 21 nt, artificial
  Oligomer
aacugauuuugaggauucuga

SEQ ID NO: 8541 - RNA, 21 nt, artificial
  Oligomer
cugauuuugaggauucugagg

SEQ ID NO: 8542 - RNA, 21 nt, artificial
  Oligomer
agcucaguauuguggaaagag

SEQ ID NO: 8543 - RNA, 21 nt, artificial
  Oligomer
acaguuucauaaucuuaggga

SEQ ID NO: 8544 - RNA, 21 nt, artificial
  Oligomer
acugaaccuuuugauccuuuc

SEQ ID NO: 8545 - RNA, 21 nt, artificial
  Oligomer
aucuuuucccuaacuuccacu

SEQ ID NO: 8546 - RNA, 21 nt, artificial
  Oligomer
ucuuuucccuaacuuccacug

SEQ ID NO: 8547 - RNA, 21 nt, artificial
  Oligomer
acuuccacugacauuacugag

SEQ ID NO: 8548 - RNA, 21 nt, artificial
  Oligomer
guaaaagugcucucaaaacca

SEQ ID NO: 8549 - RNA, 21 nt, artificial
  Oligomer
aguuagaaguuuuccuuguug

SEQ ID NO: 8550 - RNA, 21 nt, artificial
  Oligomer
gugagguagauguuguagcug

SEQ ID NO: 8551 - RNA, 21 nt, artificial
  Oligomer
agguagauguuguagcugagg

SEQ ID NO: 8552 - RNA, 21 nt, artificial
  Oligomer
uagauguuguagcugaggaag

SEQ ID NO: 8553 - RNA, 21 nt, artificial
  Oligomer
cauuguuccuuuccugcaucu

SEQ ID NO: 8554 - RNA, 21 nt, artificial
  Oligomer
acugacuugagaauggaugcg

SEQ ID NO: 8555 - RNA, 21 nt, artificial
  Oligomer
cugacuugagaauggaugcga

SEQ ID NO: 8556 - RNA, 21 nt, artificial
  Oligomer
aacaucaccaccucauagcug

SEQ ID NO: 8557 - RNA, 21 nt, artificial
  Oligomer
cucauagcugaacacaucuuc

SEQ ID NO: 8558 - RNA, 21 nt, artificial
  Oligomer
aucuugaaacuccugcuuauc

SEQ ID NO: 8559 - RNA, 21 nt, artificial
  Oligomer
gauacuaaagaagucuuccuc

SEQ ID NO: 8560 - RNA, 21 nt, artificial
  Oligomer
uugucccacuuccauuuugaa

SEQ ID NO: 8561 - RNA, 21 nt, artificial
  Oligomer
uuguguaaaagaacuuaggug

SEQ ID NO: 8562 - RNA, 21 nt, artificial
  Oligomer
agagauacagaaacaugggac

SEQ ID NO: 8563 - RNA, 21 nt, artificial
  Oligomer
gagauacagaaacaugggacc

SEQ ID NO: 8564 - RNA, 21 nt, artificial
  Oligomer
cuuagguggaauaucauaaac

SEQ ID NO: 8565 - RNA, 21 nt, artificial
  Oligomer
auguguguaccaaaagacuuc

SEQ ID NO: 8566 - RNA, 21 nt, artificial
  Oligomer
cacagcgugaugacaacucca

SEQ ID NO: 8567 - RNA, 21 nt, artificial
  Oligomer
gaugacaacuccagugaugcc

SEQ ID NO: 8568 - RNA, 21 nt, artificial
  Oligomer
caaugcuucaucauucuuaga

SEQ ID NO: 8569 - RNA, 21 nt, artificial
  Oligomer
ucaucauucuuagaguaccug

SEQ ID NO: 8570 - RNA, 21 nt, artificial
  Oligomer
auuugucagaccuacccucag

SEQ ID NO: 8571 - RNA, 21 nt, artificial
  Oligomer
uuccuccuaaaccagucuucu

SEQ ID NO: 8572 - RNA, 21 nt, artificial
  Oligomer
gaaauauauagcuacuccuug

SEQ ID NO: 8573 - RNA, 21 nt, artificial
  Oligomer
ugaaccuuuugauccuuuccc

SEQ ID NO: 8574 - RNA, 21 nt, artificial
  Oligomer
aaccuuuugauccuuucccuu

SEQ ID NO: 8575 - RNA, 21 nt, artificial
  Oligomer
uuugauccuuucccuuuugau

SEQ ID NO: 8576 - RNA, 21 nt, artificial
  Oligomer
aaucuuuucccuaacuuccac

SEQ ID NO: 8577 - RNA, 21 nt, artificial
  Oligomer
uuuucccuaacuuccacugac

SEQ ID NO: 8578 - RNA, 21 nt, artificial
  Oligomer
uuucccuaacuuccacugaca

SEQ ID NO: 8579 - RNA, 21 nt, artificial
  Oligomer
aacuuccacugacauuacuga

SEQ ID NO: 8580 - RNA, 21 nt, artificial
  Oligomer
gcacaacccacauuuauuucc

SEQ ID NO: 8581 - RNA, 21 nt, artificial
  Oligomer
ccuuguugaaaaugaaaugca

SEQ ID NO: 8582 - RNA, 21 nt, artificial
  Oligomer
agugagguagauguuguagcu

SEQ ID NO: 8583 - RNA, 21 nt, artificial
  Oligomer
aucugcaaaccacucaaaggc

SEQ ID NO: 8584 - RNA, 21 nt, artificial
  Oligomer
aauauuuguaccagacugacu

SEQ ID NO: 8585 - RNA, 21 nt, artificial
  Oligomer
cuugagaauggaugcgaaggg

SEQ ID NO: 8586 - RNA, 21 nt, artificial
  Oligomer
aacgaugcggauauggauacu

SEQ ID NO: 8587 - RNA, 21 nt, artificial
  Oligomer
uacuaaagaagucuuccucag

SEQ ID NO: 8588 - RNA, 21 nt, artificial
  Oligomer
gaagaagaucacaaagagaug

SEQ ID NO: 8589 - RNA, 21 nt, artificial
  Oligomer
ugauguguguaccaaaagacu

SEQ ID NO: 8590 - RNA, 21 nt, artificial
  Oligomer
augacaacuccagugaugccu

SEQ ID NO: 8591 - RNA, 21 nt, artificial
  Oligomer
uuuugccugucuccaaguuca

SEQ ID NO: 8592 - RNA, 21 nt, artificial
  Oligomer
uucacacaccauuccacauua

SEQ ID NO: 8593 - RNA, 21 nt, artificial
  Oligomer
ucauucuuagaguaccuguua

SEQ ID NO: 8594 - RNA, 21 nt, artificial
  Oligomer
ugaagauagaaaaccuuggag

SEQ ID NO: 8595 - RNA, 21 nt, artificial
  Oligomer
aagauagaaaaccuuggagaa

SEQ ID NO: 8596 - RNA, 21 nt, artificial
  Oligomer
auagaaaaccuuggagaaaca

SEQ ID NO: 8597 - RNA, 21 nt, artificial
  Oligomer
auagaugugcaauggugugaa

SEQ ID NO: 8598 - RNA, 21 nt, artificial
  Oligomer
auuuccuuuuccuccuaaacc

SEQ ID NO: 8599 - RNA, 21 nt, artificial
  Oligomer
cuuuuccuccuaaaccagucu

SEQ ID NO: 8600 - RNA, 21 nt, artificial
  Oligomer
ccauuuuguguguguauuuac

SEQ ID NO: 8601 - RNA, 21 nt, artificial
  Oligomer
ucaaauaagaaugugcagaac

SEQ ID NO: 8602 - RNA, 21 nt, artificial
  Oligomer
gaaugugcagaacccuucagg

SEQ ID NO: 8603 - RNA, 21 nt, artificial
  Oligomer
uuaguauccuuagccuguucu

SEQ ID NO: 8604 - RNA, 21 nt, artificial
  Oligomer
aacaucuggcccaguuacccu

SEQ ID NO: 8605 - RNA, 21 nt, artificial
  Oligomer
augauggcaaaaaugacacaa

SEQ ID NO: 8606 - RNA, 21 nt, artificial
  Oligomer
gaaccuuuugauccuuucccu

SEQ ID NO: 8607 - RNA, 21 nt, artificial
  Oligomer
auccuuucccuuuugauucua

SEQ ID NO: 8608 - RNA, 21 nt, artificial
  Oligomer
cuuuaagggaaaaccauuaca

SEQ ID NO: 8609 - RNA, 21 nt, artificial
  Oligomer
guuagaaguuuuccuuguuga

SEQ ID NO: 8610 - RNA, 21 nt, artificial
  Oligomer
ucugcaaaccacucaaaggca

SEQ ID NO: 8611 - RNA, 21 nt, artificial
  Oligomer
accucauagcugaacacaucu

SEQ ID NO: 8612 - RNA, 21 nt, artificial
  Oligomer
ugcugacccaagaaguuuucu

SEQ ID NO: 8613 - RNA, 21 nt, artificial
  Oligomer
gauauggauacuaaagaaguc

SEQ ID NO: 8614 - RNA, 21 nt, artificial
  Oligomer
ugucaguguaaaagggugcca

SEQ ID NO: 8615 - RNA, 21 nt, artificial
  Oligomer
uuggacaccuuugggcacuug

SEQ ID NO: 8616 - RNA, 21 nt, artificial
  Oligomer
uugacaaaaauguauuguccc

SEQ ID NO: 8617 - RNA, 21 nt, artificial
  Oligomer
uauccauuuccaagucauagg

SEQ ID NO: 8618 - RNA, 21 nt, artificial
  Oligomer
aauaccagacaaagaggaaga

SEQ ID NO: 8619 - RNA, 21 nt, artificial
  Oligomer
guagaauuaucucccaggucc

SEQ ID NO: 8620 - RNA, 21 nt, artificial
  Oligomer
aagcugguuuuaauuaugcac

SEQ ID NO: 8621 - RNA, 21 nt, artificial
  Oligomer
uacccucuccaguucauacuu

SEQ ID NO: 8622 - RNA, 21 nt, artificial
  Oligomer
aaacagagccugacucauagu

SEQ ID NO: 8623 - RNA, 21 nt, artificial
  Oligomer
uauuuccuuuuccuccuaaac

SEQ ID NO: 8624 - RNA, 21 nt, artificial
  Oligomer
uuuuccuccuaaaccagucuu

SEQ ID NO: 8625 - RNA, 21 nt, artificial
  Oligomer
uuagucacacagaugcgaucc

SEQ ID NO: 8626 - RNA, 21 nt, artificial
  Oligomer
uaagaaugugcagaacccuuc

SEQ ID NO: 8627 - RNA, 21 nt, artificial
  Oligomer
uuagccuguucuugacccuag

SEQ ID NO: 8628 - RNA, 21 nt, artificial
  Oligomer
acuccuugguuuccuucuucu

SEQ ID NO: 8629 - RNA, 21 nt, artificial
  Oligomer
aguuucauaaucuuagggaag

SEQ ID NO: 8630 - RNA, 21 nt, artificial
  Oligomer
aggccugugaucacaucuuuc

SEQ ID NO: 8631 - RNA, 21 nt, artificial
  Oligomer
gugcugacccaagaaguuuuc

SEQ ID NO: 8632 - RNA, 21 nt, artificial
  Oligomer
gucaguguaaaagggugccac

SEQ ID NO: 8633 - RNA, 21 nt, artificial
  Oligomer
cuucuucuucaucuguagcuc

SEQ ID NO: 8634 - RNA, 21 nt, artificial
  Oligomer
cugcaaguauucaaauuucac

SEQ ID NO: 8635 - RNA, 21 nt, artificial
  Oligomer
uuuccuuuuccuccuaaacca

SEQ ID NO: 8636 - RNA, 21 nt, artificial
  Oligomer
uccuuagccuguucuugaccc

SEQ ID NO: 8637 - RNA, 21 nt, artificial
  Oligomer
aagaacaucuggcccaguuac

SEQ ID NO: 8638 - RNA, 21 nt, artificial
  Oligomer
auggcaaaaaugacacaaagu

SEQ ID NO: 8639 - RNA, 21 nt, artificial
  Oligomer
ccuaacuuccacugacauuac

SEQ ID NO: 8640 - RNA, 21 nt, artificial
  Oligomer
ccuuuaagggaaaaccauuac

SEQ ID NO: 8641 - RNA, 21 nt, artificial
  Oligomer
auucauuaucccaguugggcc

SEQ ID NO: 8642 - RNA, 21 nt, artificial
  Oligomer
ccagugagguagauguuguag

SEQ ID NO: 8643 - RNA, 21 nt, artificial
  Oligomer
ugcucccacuaacaucaccac

SEQ ID NO: 8644 - RNA, 21 nt, artificial
  Oligomer
uaucuuagguaguuuccacgc

SEQ ID NO: 8645 - RNA, 21 nt, artificial
  Oligomer
gcacuugacaaaaauguauug

SEQ ID NO: 8646 - RNA, 21 nt, artificial
  Oligomer
uacagaaacaugggacccacu

SEQ ID NO: 8647 - RNA, 21 nt, artificial
  Oligomer
cacaaacacaauugcaaaagc

SEQ ID NO: 8648 - RNA, 21 nt, artificial
  Oligomer
uaacugagguacccucuccag

SEQ ID NO: 8649 - RNA, 21 nt, artificial
  Oligomer
uugggcaggaaauuagucugc

SEQ ID NO: 8650 - RNA, 21 nt, artificial
  Oligomer
auuuuauagcacaaggagcag

SEQ ID NO: 8651 - RNA, 21 nt, artificial
  Oligomer
uaguauccuuagccuguucuu

SEQ ID NO: 8652 - RNA, 21 nt, artificial
  Oligomer
uauccuuagccuguucuugac

SEQ ID NO: 8653 - RNA, 21 nt, artificial
  Oligomer
aacuggaguaugcucagaugu

SEQ ID NO: 8654 - RNA, 21 nt, artificial
  Oligomer
auuauguccuaaugaucugga

SEQ ID NO: 8655 - RNA, 21 nt, artificial
  Oligomer
ggcaaaaaugacacaaaguag

SEQ ID NO: 8656 - RNA, 21 nt, artificial
  Oligomer
caaacaaucuuugacauuccu

SEQ ID NO: 8657 - RNA, 21 nt, artificial
  Oligomer
gguauuaggguguugacuugc

SEQ ID NO: 8658 - RNA, 21 nt, artificial
  Oligomer
ucccacuaacaucaccaccuc

SEQ ID NO: 8659 - RNA, 21 nt, artificial
  Oligomer
acguacaauucguucagcucc

SEQ ID NO: 8660 - RNA, 21 nt, artificial
  Oligomer
uaaacccgguaauaccagaca

SEQ ID NO: 8661 - RNA, 21 nt, artificial
  Oligomer
aaagccugcaaguauucaaau

SEQ ID NO: 8662 - RNA, 21 nt, artificial
  Oligomer
agaaaggcuauauucgcacag

SEQ ID NO: 8663 - RNA, 21 nt, artificial
  Oligomer
accauuagucacacagaugcg

SEQ ID NO: 8664 - RNA, 21 nt, artificial
  Oligomer
augcuucaaauaagaaugugc

SEQ ID NO: 8665 - RNA, 21 nt, artificial
  Oligomer
ucuugacccuagggagaauca

SEQ ID NO: 8666 - RNA, 21 nt, artificial
  Oligomer
uacucaggguuucagccaagg

SEQ ID NO: 8667 - RNA, 21 nt, artificial
  Oligomer
uucauuaucccaguugggccg

SEQ ID NO: 8668 - RNA, 21 nt, artificial
  Oligomer
ugcacagcaaagugauuggcc

SEQ ID NO: 8669 - RNA, 21 nt, artificial
  Oligomer
uuuguaccagacugacuugag

SEQ ID NO: 8670 - RNA, 21 nt, artificial
  Oligomer
aaacccgguaauaccagacaa

SEQ ID NO: 8671 - RNA, 21 nt, artificial
  Oligomer
ucagaaaggcuauauucgcac

SEQ ID NO: 8672 - RNA, 21 nt, artificial
  Oligomer
cagagugaagugcaaucaucc

SEQ ID NO: 8673 - RNA, 21 nt, artificial
  Oligomer
uuuuaugaaaggugagauucc

SEQ ID NO: 8674 - RNA, 21 nt, artificial
  Oligomer
uuuauagcacaaggagcagga

SEQ ID NO: 8675 - RNA, 21 nt, artificial
  Oligomer
guauuaguaaacuggaguaug

SEQ ID NO: 8676 - RNA, 21 nt, artificial
  Oligomer
guugacuugcaauugucuuga

SEQ ID NO: 8677 - RNA, 21 nt, artificial
  Oligomer
gaauucauuaucccaguuggg

SEQ ID NO: 8678 - RNA, 21 nt, artificial
  Oligomer
uuuuugagcuucagauuggug

SEQ ID NO: 8679 - RNA, 21 nt, artificial
  Oligomer
uugguggcguuauugcaauau

SEQ ID NO: 8680 - RNA, 21 nt, artificial
  Oligomer
aucaaccgcuaucuuagguag

SEQ ID NO: 8681 - RNA, 21 nt, artificial
  Oligomer
uuagguaguuuccacgcaucu

SEQ ID NO: 8682 - RNA, 21 nt, artificial
  Oligomer
uacaauucguucagcuccaug

SEQ ID NO: 8683 - RNA, 21 nt, artificial
  Oligomer
aagaccuccggaugguuuugg

SEQ ID NO: 8684 - RNA, 21 nt, artificial
  Oligomer
uuccacauuaaauagaugugc

SEQ ID NO: 8685 - RNA, 21 nt, artificial
  Oligomer
caucaguauguguauaccucc

SEQ ID NO: 8686 - RNA, 21 nt, artificial
  Oligomer
uaaaccagucuucugcccuuc

SEQ ID NO: 8687 - RNA, 21 nt, artificial
  Oligomer
uaaaacugguuuuaguuccca

SEQ ID NO: 8688 - RNA, 21 nt, artificial
  Oligomer
uagaugagccagagucauggc

SEQ ID NO: 8689 - RNA, 21 nt, artificial
  Oligomer
aaaggugagauuccuguccag

SEQ ID NO: 8690 - RNA, 21 nt, artificial
  Oligomer
uuccuguccaguugucuucga

SEQ ID NO: 8691 - RNA, 21 nt, artificial
  Oligomer
ccugcuguauuaguaaacugg

SEQ ID NO: 8692 - RNA, 21 nt, artificial
  Oligomer
auuaguaaacuggaguaugcu

SEQ ID NO: 8693 - RNA, 21 nt, artificial
  Oligomer
aguaaacuggaguaugcucag

SEQ ID NO: 8694 - RNA, 21 nt, artificial
  Oligomer
aaacuggaguaugcucagaug

SEQ ID NO: 8695 - RNA, 21 nt, artificial
  Oligomer
cuaaugaucuggaaaauuucc

SEQ ID NO: 8696 - RNA, 21 nt, artificial
  Oligomer
uuacucaggguuucagccaag

SEQ ID NO: 8697 - RNA, 21 nt, artificial
  Oligomer
uauucugguauuaggguguug

SEQ ID NO: 8698 - RNA, 21 nt, artificial
  Oligomer
uaggguguugacuugcaauug

SEQ ID NO: 8699 - RNA, 21 nt, artificial
  Oligomer
uugacuugcaauugucuugaa

SEQ ID NO: 8700 - RNA, 21 nt, artificial
  Oligomer
aauucauuaucccaguugggc

SEQ ID NO: 8701 - RNA, 21 nt, artificial
  Oligomer
ucauuaucccaguugggccgu

SEQ ID NO: 8702 - RNA, 21 nt, artificial
  Oligomer
gugcacagcaaagugauuggc

SEQ ID NO: 8703 - RNA, 21 nt, artificial
  Oligomer
auguuguagcugaggaagccg

SEQ ID NO: 8704 - RNA, 21 nt, artificial
  Oligomer
cuugacaaaaauguauugucc

SEQ ID NO: 8705 - RNA, 21 nt, artificial
  Oligomer
agcucgaugguuuugaaaggg

SEQ ID NO: 8706 - RNA, 21 nt, artificial
  Oligomer
aagucauaggaggguuuccag

SEQ ID NO: 8707 - RNA, 21 nt, artificial
  Oligomer
augcacagccaaacucucugc

SEQ ID NO: 8708 - RNA, 21 nt, artificial
  Oligomer
uucuuuauucucuuucgagca

SEQ ID NO: 8709 - RNA, 21 nt, artificial
  Oligomer
acuccuuauaacugagguacc

SEQ ID NO: 8710 - RNA, 21 nt, artificial
  Oligomer
augaauugauaccugaggugc

SEQ ID NO: 8711 - RNA, 21 nt, artificial
  Oligomer
aaggcuauauucgcacagcag

SEQ ID NO: 8712 - RNA, 21 nt, artificial
  Oligomer
aagaaaacccugcucuuggcc

SEQ ID NO: 8713 - RNA, 21 nt, artificial
  Oligomer
ugauuuagagacucucucuug

SEQ ID NO: 8714 - RNA, 21 nt, artificial
  Oligomer
uuuuauagcacaaggagcagg

SEQ ID NO: 8715 - RNA, 21 nt, artificial
  Oligomer
cucucaacauguauuaugucc

SEQ ID NO: 8716 - RNA, 21 nt, artificial
  Oligomer
ugaucuggaaaauuuccuuca

SEQ ID NO: 8717 - RNA, 21 nt, artificial
  Oligomer
auucugguauuaggguguuga

SEQ ID NO: 8718 - RNA, 21 nt, artificial
  Oligomer
acucaaaggcauguguguccc

SEQ ID NO: 8719 - RNA, 21 nt, artificial
  Oligomer
auuuguaccagacugacuuga

SEQ ID NO: 8720 - RNA, 21 nt, artificial
  Oligomer
uugaaacuccugcuuaucaca

SEQ ID NO: 8721 - RNA, 21 nt, artificial
  Oligomer
cuaaagaagucuuccucaggg

SEQ ID NO: 8722 - RNA, 21 nt, artificial
  Oligomer
gaccaccuucuguugagaucg

SEQ ID NO: 8723 - RNA, 21 nt, artificial
  Oligomer
cacagagauacagaaacaugg

SEQ ID NO: 8724 - RNA, 21 nt, artificial
  Oligomer
acaauucguucagcuccaugg

SEQ ID NO: 8725 - RNA, 21 nt, artificial
  Oligomer
uucucuuucgagcaaaauuga

SEQ ID NO: 8726 - RNA, 21 nt, artificial
  Oligomer
cauaacuggauaacacagggc

SEQ ID NO: 8727 - RNA, 21 nt, artificial
  Oligomer
uaacuggauaacacagggcag

SEQ ID NO: 8728 - RNA, 21 nt, artificial
  Oligomer
gacuccuuauaacugagguac

SEQ ID NO: 8729 - RNA, 21 nt, artificial
  Oligomer
caaaacaacaucaguaugugu

SEQ ID NO: 8730 - RNA, 21 nt, artificial
  Oligomer
cagcucuuucuccuucuuccu

SEQ ID NO: 8731 - RNA, 21 nt, artificial
  Oligomer
auaaaacugguuuuaguuccc

SEQ ID NO: 8732 - RNA, 21 nt, artificial
  Oligomer
agcaguucuaagaacaaaaag

SEQ ID NO: 8733 - RNA, 21 nt, artificial
  Oligomer
acaaagaggaagacguucaac

SEQ ID NO: 8734 - RNA, 21 nt, artificial
  Oligomer
uuugggcaggaaauuagucug

SEQ ID NO: 8735 - RNA, 21 nt, artificial
  Oligomer
uagcacaaggagcaggacuag

SEQ ID NO: 8736 - RNA, 21 nt, artificial
  Oligomer
uuaugaaaggugagauuccug

SEQ ID NO: 8737 - RNA, 21 nt, artificial
  Oligomer
uaugaaaggugagauuccugu

SEQ ID NO: 8738 - RNA, 21 nt, artificial
  Oligomer
gaugaguauuacauuaacucc

SEQ ID NO: 8739 - RNA, 21 nt, artificial
  Oligomer
uguagaaagaacaucuggccc

SEQ ID NO: 8740 - RNA, 21 nt, artificial
  Oligomer
uaaacuggaguaugcucagau

SEQ ID NO: 8741 - RNA, 21 nt, artificial
  Oligomer
uugucuucgaacucuuguuga

SEQ ID NO: 8742 - RNA, 21 nt, artificial
  Oligomer
uuauguccuaaugaucuggaa

SEQ ID NO: 8743 - RNA, 21 nt, artificial
  Oligomer
gaucuggaaaauuuccuucag

SEQ ID NO: 8744 - RNA, 21 nt, artificial
  Oligomer
uagcauuauuugagcauuugg

SEQ ID NO: 8745 - RNA, 21 nt, artificial
  Oligomer
uguuuacucaggguuucagcc

SEQ ID NO: 8746 - RNA, 21 nt, artificial
  Oligomer
agaggaaaacuccuauucugg

SEQ ID NO: 8747 - RNA, 21 nt, artificial
  Oligomer
uucaggccugugaucacaucu

SEQ ID NO: 8748 - RNA, 21 nt, artificial
  Oligomer
aucagcaugcaguugaaauuc

SEQ ID NO: 8749 - RNA, 21 nt, artificial
  Oligomer
uagcucgaugguuuugaaagg

SEQ ID NO: 8750 - RNA, 21 nt, artificial
  Oligomer
ucacagagauacagaaacaug

SEQ ID NO: 8751 - RNA, 21 nt, artificial
  Oligomer
uugggcauuccuuuauuuuuc

SEQ ID NO: 8752 - RNA, 21 nt, artificial
  Oligomer
aggaucagaauuauugacucg

SEQ ID NO: 8753 - RNA, 21 nt, artificial
  Oligomer
caauugcaaaagcagaagaac

SEQ ID NO: 8754 - RNA, 21 nt, artificial
  Oligomer
auaacuggauaacacagggca

SEQ ID NO: 8755 - RNA, 21 nt, artificial
  Oligomer
aaagggccaauauucucagac

SEQ ID NO: 8756 - RNA, 21 nt, artificial
  Oligomer
uauaacugagguacccucucc

SEQ ID NO: 8757 - RNA, 21 nt, artificial
  Oligomer
aaaugggagcaguucuaagaa

SEQ ID NO: 8758 - RNA, 21 nt, artificial
  Oligomer
auuuuguguguguauuuacgg

SEQ ID NO: 8759 - RNA, 21 nt, artificial
  Oligomer
aaggugagauuccuguccagu

SEQ ID NO: 8760 - RNA, 21 nt, artificial
  Oligomer
ugugugguucuaaauucauuc

SEQ ID NO: 8761 - RNA, 21 nt, artificial
  Oligomer
uacccugcuguauuaguaaac

SEQ ID NO: 8762 - RNA, 21 nt, artificial
  Oligomer
uaauaaguguugagacacucu

SEQ ID NO: 8763 - RNA, 21 nt, artificial
  Oligomer
auaaguguugagacacucuca

SEQ ID NO: 8764 - RNA, 21 nt, artificial
  Oligomer
uauagcuacuccuugguuucc

SEQ ID NO: 8765 - RNA, 21 nt, artificial
  Oligomer
aucuuagggaaguuacugaac

SEQ ID NO: 8766 - RNA, 21 nt, artificial
  Oligomer
auuuauuuccucauggaagag

SEQ ID NO: 8767 - RNA, 21 nt, artificial
  Oligomer
agaugcuuuguuuacucaggg

SEQ ID NO: 8768 - RNA, 21 nt, artificial
  Oligomer
cuuuguuuacucaggguuuca

SEQ ID NO: 8769 - RNA, 21 nt, artificial
  Oligomer
uuucagccaaggcuucagguc

SEQ ID NO: 8770 - RNA, 21 nt, artificial
  Oligomer
uuucuccucaucauggugcac

SEQ ID NO: 8771 - RNA, 21 nt, artificial
  Oligomer
augcaguugaaauucaggcag

SEQ ID NO: 8772 - RNA, 21 nt, artificial
  Oligomer
aauggaugcgaagggugugac

SEQ ID NO: 8773 - RNA, 21 nt, artificial
  Oligomer
uaucacagccacaagcauuga

SEQ ID NO: 8774 - RNA, 21 nt, artificial
  Oligomer
uaaaagggugccacuccagcu

SEQ ID NO: 8775 - RNA, 21 nt, artificial
  Oligomer
ucuucaucuguagcucgaugg

SEQ ID NO: 8776 - RNA, 21 nt, artificial
  Oligomer
uagguggaauaucauaaaccc

SEQ ID NO: 8777 - RNA, 21 nt, artificial
  Oligomer
aacuguuauauuaugcacagc

SEQ ID NO: 8778 - RNA, 21 nt, artificial
  Oligomer
auggauggcaaggccaaugaa

SEQ ID NO: 8779 - RNA, 21 nt, artificial
  Oligomer
uaagaccuccggaugguuuug

SEQ ID NO: 8780 - RNA, 21 nt, artificial
  Oligomer
ucauaacuggauaacacaggg

SEQ ID NO: 8781 - RNA, 21 nt, artificial
  Oligomer
uagguuagaaagggccaauau

SEQ ID NO: 8782 - RNA, 21 nt, artificial
  Oligomer
cuccuuauaacugagguaccc

SEQ ID NO: 8783 - RNA, 21 nt, artificial
  Oligomer
uucagaaaggcuauauucgca

SEQ ID NO: 8784 - RNA, 21 nt, artificial
  Oligomer
aaaggcuauauucgcacagca

SEQ ID NO: 8785 - RNA, 21 nt, artificial
  Oligomer
acagcaggccuuauuugucag

SEQ ID NO: 8786 - RNA, 21 nt, artificial
  Oligomer
ggaaugaccaauaugagaccc

SEQ ID NO: 8787 - RNA, 21 nt, artificial
  Oligomer
gugaagugcaaucauccaugc

SEQ ID NO: 8788 - RNA, 21 nt, artificial
  Oligomer
aagugcaaucauccaugccac

SEQ ID NO: 8789 - RNA, 21 nt, artificial
  Oligomer
uuuaguucccagaaaugggag

SEQ ID NO: 8790 - RNA, 21 nt, artificial
  Oligomer
ucauggcaggagguuaauucu

SEQ ID NO: 8791 - RNA, 21 nt, artificial
  Oligomer
augaaaggugagauuccuguc

SEQ ID NO: 8792 - RNA, 21 nt, artificial
  Oligomer
aaagaggaagacguucaaccc

SEQ ID NO: 8793 - RNA, 21 nt, artificial
  Oligomer
cuguagaaagaacaucuggcc

SEQ ID NO: 8794 - RNA, 21 nt, artificial
  Oligomer
cugcuguauuaguaaacugga

SEQ ID NO: 8795 - RNA, 21 nt, artificial
  Oligomer
uuaguaaacuggaguaugcuc

SEQ ID NO: 8796 - RNA, 21 nt, artificial
  Oligomer
acucucaacauguauuauguc

SEQ ID NO: 8797 - RNA, 21 nt, artificial
  Oligomer
ucucaacauguauuauguccu

SEQ ID NO: 8798 - RNA, 21 nt, artificial
  Oligomer
aucuggaaaauuuccuucagu

SEQ ID NO: 8799 - RNA, 21 nt, artificial
  Oligomer
auauagcuacuccuugguuuc

SEQ ID NO: 8800 - RNA, 21 nt, artificial
  Oligomer
aaaccuggaguaagaugggcu

SEQ ID NO: 8801 - RNA, 21 nt, artificial
  Oligomer
aagucuuuuguuucaggccug

SEQ ID NO: 8802 - RNA, 21 nt, artificial
  Oligomer
aucuuucuccucaucauggug

SEQ ID NO: 8803 - RNA, 21 nt, artificial
  Oligomer
aucauggugcacagcaaagug

SEQ ID NO: 8804 - RNA, 21 nt, artificial
  Oligomer
ggugcacagcaaagugauugg

SEQ ID NO: 8805 - RNA, 21 nt, artificial
  Oligomer
uuugagcuucagauugguggc

SEQ ID NO: 8806 - RNA, 21 nt, artificial
  Oligomer
aacuccugcuuaucacagcca

SEQ ID NO: 8807 - RNA, 21 nt, artificial
  Oligomer
uuugaaagggugagugaccac

SEQ ID NO: 8808 - RNA, 21 nt, artificial
  Oligomer
accaccuucuguugagaucgc

SEQ ID NO: 8809 - RNA, 21 nt, artificial
  Oligomer
uugagaucgccaaaaccgcac

SEQ ID NO: 8810 - RNA, 21 nt, artificial
  Oligomer
aaacugagggauugggcauuc

SEQ ID NO: 8811 - RNA, 21 nt, artificial
  Oligomer
ugggcauuccuuuauuuuucc

SEQ ID NO: 8812 - RNA, 21 nt, artificial
  Oligomer
aaguaagaccuccggaugguu

SEQ ID NO: 8813 - RNA, 21 nt, artificial
  Oligomer
agaccuccggaugguuuuggu

SEQ ID NO: 8814 - RNA, 21 nt, artificial
  Oligomer
aaggaucagaauuauugacuc

SEQ ID NO: 8815 - RNA, 21 nt, artificial
  Oligomer
gaucagaauuauugacucggg

SEQ ID NO: 8816 - RNA, 21 nt, artificial
  Oligomer
uccacauuaaauagaugugca

SEQ ID NO: 8817 - RNA, 21 nt, artificial
  Oligomer
gaagcugguuuuaauuaugca

SEQ ID NO: 8818 - RNA, 21 nt, artificial
  Oligomer
agaaagggccaauauucucag

SEQ ID NO: 8819 - RNA, 21 nt, artificial
  Oligomer
auggugugaaucgcagaguga

SEQ ID NO: 8820 - RNA, 21 nt, artificial
  Oligomer
auccugguacauuucagaaag

SEQ ID NO: 8821 - RNA, 21 nt, artificial
  Oligomer
uccugguacauuucagaaagg

SEQ ID NO: 8822 - RNA, 21 nt, artificial
  Oligomer
ucagcaucaaaauuugugacc

SEQ ID NO: 8823 - RNA, 21 nt, artificial
  Oligomer
aacaucaguauguguauaccu

SEQ ID NO: 8824 - RNA, 21 nt, artificial
  Oligomer
aaagaaaacccugcucuuggc

SEQ ID NO: 8825 - RNA, 21 nt, artificial
  Oligomer
uuagagacucucucuugaaca

SEQ ID NO: 8826 - RNA, 21 nt, artificial
  Oligomer
auagagauuuuuguuucuggg

SEQ ID NO: 8827 - RNA, 21 nt, artificial
  Oligomer
uucuggguuguuaauuuuagg

SEQ ID NO: 8828 - RNA, 21 nt, artificial
  Oligomer
aaccauuagucacacagaugc

SEQ ID NO: 8829 - RNA, 21 nt, artificial
  Oligomer
aaaacuuacuugaguauccgc

SEQ ID NO: 8830 - RNA, 21 nt, artificial
  Oligomer
uaguaaacuggaguaugcuca

SEQ ID NO: 8831 - RNA, 21 nt, artificial
  Oligomer
uucugaggcagcucaguauug

SEQ ID NO: 8832 - RNA, 21 nt, artificial
  Oligomer
uauuugagcauuuggcagcac

SEQ ID NO: 8833 - RNA, 21 nt, artificial
  Oligomer
acagaggaaaacuccuauucu

SEQ ID NO: 8834 - RNA, 21 nt, artificial
  Oligomer
acuccuauucugguauuaggg

SEQ ID NO: 8835 - RNA, 21 nt, artificial
  Oligomer
uauuaggguguugacuugcaa

SEQ ID NO: 8836 - RNA, 21 nt, artificial
  Oligomer
caguugaaauucaggcaggcu

SEQ ID NO: 8837 - RNA, 21 nt, artificial
  Oligomer
guugaaauucaggcaggcugc

SEQ ID NO: 8838 - RNA, 21 nt, artificial
  Oligomer
uuaucacagccacaagcauug

SEQ ID NO: 8839 - RNA, 21 nt, artificial
  Oligomer
uguaaaagggugccacuccag

SEQ ID NO: 8840 - RNA, 21 nt, artificial
  Oligomer
aaccagaaugacaaaaaugga

SEQ ID NO: 8841 - RNA, 21 nt, artificial
  Oligomer
uuggugaugaccaccuucugu

SEQ ID NO: 8842 - RNA, 21 nt, artificial
  Oligomer
augaccaccuucuguugagau

SEQ ID NO: 8843 - RNA, 21 nt, artificial
  Oligomer
uaggaggguuuccagcaaacu

SEQ ID NO: 8844 - RNA, 21 nt, artificial
  Oligomer
acuguuauauuaugcacagcc

SEQ ID NO: 8845 - RNA, 21 nt, artificial
  Oligomer
uuaauaugaggcacagcguga

SEQ ID NO: 8846 - RNA, 21 nt, artificial
  Oligomer
aauaugaggcacagcgugaug

SEQ ID NO: 8847 - RNA, 21 nt, artificial
  Oligomer
uaugaggcacagcgugaugac

SEQ ID NO: 8848 - RNA, 21 nt, artificial
  Oligomer
aggguucuuuauucucuuucg

SEQ ID NO: 8849 - RNA, 21 nt, artificial
  Oligomer
auucucuuucgagcaaaauug

SEQ ID NO: 8850 - RNA, 21 nt, artificial
  Oligomer
ugagauaacuuucauuuugcc

SEQ ID NO: 8851 - RNA, 21 nt, artificial
  Oligomer
accuuggagaaacacucucgg

SEQ ID NO: 8852 - RNA, 21 nt, artificial
  Oligomer
aagggccaauauucucagacu

SEQ ID NO: 8853 - RNA, 21 nt, artificial
  Oligomer
ucagacuccuuauaacugagg

SEQ ID NO: 8854 - RNA, 21 nt, artificial
  Oligomer
aacaggcuggaccuaaguguc

SEQ ID NO: 8855 - RNA, 21 nt, artificial
  Oligomer
cucagcaucaaaauuugugac

SEQ ID NO: 8856 - RNA, 21 nt, artificial
  Oligomer
acaacaucaguauguguauac

SEQ ID NO: 8857 - RNA, 21 nt, artificial
  Oligomer
caacaucaguauguguauacc

SEQ ID NO: 8858 - RNA, 21 nt, artificial
  Oligomer
caguauguguauaccuccuuc

SEQ ID NO: 8859 - RNA, 21 nt, artificial
  Oligomer
ugaagugcaaucauccaugcc

SEQ ID NO: 8860 - RNA, 21 nt, artificial
  Oligomer
uuaccgaaguugaagaguucu

SEQ ID NO: 8861 - RNA, 21 nt, artificial
  Oligomer
caccauuuuaugaaaggugag

SEQ ID NO: 8862 - RNA, 21 nt, artificial
  Oligomer
uuuaugaaaggugagauuccu

SEQ ID NO: 8863 - RNA, 21 nt, artificial
  Oligomer
caggagguuaauucuccaccu

SEQ ID NO: 8864 - RNA, 21 nt, artificial
  Oligomer
ugaaaggugagauuccugucc

SEQ ID NO: 8865 - RNA, 21 nt, artificial
  Oligomer
caauccuauugguuaguaucc

SEQ ID NO: 8866 - RNA, 21 nt, artificial
  Oligomer
uacugucacuaauaaguguug

SEQ ID NO: 8867 - RNA, 21 nt, artificial
  Oligomer
guagaaauauauagcuacucc

SEQ ID NO: 8868 - RNA, 21 nt, artificial
  Oligomer
ucaaaccuggaguaagauggg

SEQ ID NO: 8869 - RNA, 21 nt, artificial
  Oligomer
uuauuuccucauggaagagac

SEQ ID NO: 8870 - RNA, 21 nt, artificial
  Oligomer
uuuugagcuucagauuggugg

SEQ ID NO: 8871 - RNA, 21 nt, artificial
  Oligomer
cguuauugcaauauuuguacc

SEQ ID NO: 8872 - RNA, 21 nt, artificial
  Oligomer
auugcaauauuuguaccagac

SEQ ID NO: 8873 - RNA, 21 nt, artificial
  Oligomer
ccgcuaucuuagguaguuucc

SEQ ID NO: 8874 - RNA, 21 nt, artificial
  Oligomer
aaaccagaaugacaaaaaugg

SEQ ID NO: 8875 - RNA, 21 nt, artificial
  Oligomer
gaggguuuccagcaaacugag

SEQ ID NO: 8876 - RNA, 21 nt, artificial
  Oligomer
aacugagggauugggcauucc

SEQ ID NO: 8877 - RNA, 21 nt, artificial
  Oligomer
agguggaauaucauaaacccg

SEQ ID NO: 8878 - RNA, 21 nt, artificial
  Oligomer
auaaacccgguaauaccagac

SEQ ID NO: 8879 - RNA, 21 nt, artificial
  Oligomer
uugcaaaagcagaagaacuaa

SEQ ID NO: 8880 - RNA, 21 nt, artificial
  Oligomer
aaccuuggagaaacacucucg

SEQ ID NO: 8881 - RNA, 21 nt, artificial
  Oligomer
gaaagggccaauauucucaga

SEQ ID NO: 8882 - RNA, 21 nt, artificial
  Oligomer
uuauaacugagguacccucuc

SEQ ID NO: 8883 - RNA, 21 nt, artificial
  Oligomer
auaacugagguacccucucca

SEQ ID NO: 8884 - RNA, 21 nt, artificial
  Oligomer
ucuccaguucauacuuuggug

SEQ ID NO: 8885 - RNA, 21 nt, artificial
  Oligomer
uaaacagagccugacucauag

SEQ ID NO: 8886 - RNA, 21 nt, artificial
  Oligomer
uugauaccugaggugcagugu

SEQ ID NO: 8887 - RNA, 21 nt, artificial
  Oligomer
aauggugugaaucgcagagug

SEQ ID NO: 8888 - RNA, 21 nt, artificial
  Oligomer
agcaggccuuauuugucagac

SEQ ID NO: 8889 - RNA, 21 nt, artificial
  Oligomer
aucaguauguguauaccuccu

SEQ ID NO: 8890 - RNA, 21 nt, artificial
  Oligomer
aaaccagucuucugcccuucc

SEQ ID NO: 8891 - RNA, 21 nt, artificial
  Oligomer
aguucuaaacauuuguggcuc

SEQ ID NO: 8892 - RNA, 21 nt, artificial
  Oligomer
uucagaacauacuauugagug

SEQ ID NO: 8893 - RNA, 21 nt, artificial
  Oligomer
uugagugugaauuugaucucu

SEQ ID NO: 8894 - RNA, 21 nt, artificial
  Oligomer
aguucaauauucauaagggcu

SEQ ID NO: 8895 - RNA, 21 nt, artificial
  Oligomer
cuuugggcaggaaauuagucu

SEQ ID NO: 8896 - RNA, 21 nt, artificial
  Oligomer
ugggcaggaaauuagucugca

SEQ ID NO: 8897 - RNA, 21 nt, artificial
  Oligomer
aaugugcagaacccuucaggc

SEQ ID NO: 8898 - RNA, 21 nt, artificial
  Oligomer
uugguuaguauccuuagccug

SEQ ID NO: 8899 - RNA, 21 nt, artificial
  Oligomer
auuccuuuggucuaugacagu

SEQ ID NO: 8900 - RNA, 21 nt, artificial
  Oligomer
ucuucuguagaaagaacaucu

SEQ ID NO: 8901 - RNA, 21 nt, artificial
  Oligomer
ugcucagaugucaauacuguc

SEQ ID NO: 8902 - RNA, 21 nt, artificial
  Oligomer
cucagaugucaauacugucac

SEQ ID NO: 8903 - RNA, 21 nt, artificial
  Oligomer
uucgaacucuuguugagcagc

SEQ ID NO: 8904 - RNA, 21 nt, artificial
  Oligomer
aguauuguggaaagaguauca

SEQ ID NO: 8905 - RNA, 21 nt, artificial
  Oligomer
cagacucagaguuggagaugc

SEQ ID NO: 8906 - RNA, 21 nt, artificial
  Oligomer
agacucagaguuggagaugcu

SEQ ID NO: 8907 - RNA, 21 nt, artificial
  Oligomer
uggagaugcuuuguuuacuca

SEQ ID NO: 8908 - RNA, 21 nt, artificial
  Oligomer
gaugcuuuguuuacucagggu

SEQ ID NO: 8909 - RNA, 21 nt, artificial
  Oligomer
aaagucuuuuguuucaggccu

SEQ ID NO: 8910 - RNA, 21 nt, artificial
  Oligomer
aagagaaucagcaugcaguug

SEQ ID NO: 8911 - RNA, 21 nt, artificial
  Oligomer
uuccuuuccugcaucuggcuc

SEQ ID NO: 8912 - RNA, 21 nt, artificial
  Oligomer
aaccgcuaucuuagguaguuu

SEQ ID NO: 8913 - RNA, 21 nt, artificial
  Oligomer
cuucaucuguagcucgauggu

SEQ ID NO: 8914 - RNA, 21 nt, artificial
  Oligomer
aaccucucacagagauacaga

SEQ ID NO: 8915 - RNA, 21 nt, artificial
  Oligomer
gaaacaugggacccacuaucc

SEQ ID NO: 8916 - RNA, 21 nt, artificial
  Oligomer
uuagguggaauaucauaaacc

SEQ ID NO: 8917 - RNA, 21 nt, artificial
  Oligomer
cggagcaacaaaugaagcugg

SEQ ID NO: 8918 - RNA, 21 nt, artificial
  Oligomer
cacauagguuagaaagggcca

SEQ ID NO: 8919 - RNA, 21 nt, artificial
  Oligomer
cagacuccuuauaacugaggu

SEQ ID NO: 8920 - RNA, 21 nt, artificial
  Oligomer
aacaauaaacagagccugacu

SEQ ID NO: 8921 - RNA, 21 nt, artificial
  Oligomer
aggcuggaccuaagugucucu

SEQ ID NO: 8922 - RNA, 21 nt, artificial
  Oligomer
ucuaagcagaaaccauccugg

SEQ ID NO: 8923 - RNA, 21 nt, artificial
  Oligomer
cuaagcagaaaccauccuggu

SEQ ID NO: 8924 - RNA, 21 nt, artificial
  Oligomer
uucuuccucauuaccgaaguu

SEQ ID NO: 8925 - RNA, 21 nt, artificial
  Oligomer
aaaacugguuuuaguucccag

SEQ ID NO: 8926 - RNA, 21 nt, artificial
  Oligomer
guuuuaguucccagaaauggg

SEQ ID NO: 8927 - RNA, 21 nt, artificial
  Oligomer
uuuuaguucccagaaauggga

SEQ ID NO: 8928 - RNA, 21 nt, artificial
  Oligomer
aaaacccugcucuuggccaca

SEQ ID NO: 8929 - RNA, 21 nt, artificial
  Oligomer
acagugauuuagagacucucu

SEQ ID NO: 8930 - RNA, 21 nt, artificial
  Oligomer
agugauuuagagacucucucu

SEQ ID NO: 8931 - RNA, 21 nt, artificial
  Oligomer
auugagugugaauuugaucuc

SEQ ID NO: 8932 - RNA, 21 nt, artificial
  Oligomer
aaaccauuagucacacagaug

SEQ ID NO: 8933 - RNA, 21 nt, artificial
  Oligomer
uagcuggagaagaccacuuug

SEQ ID NO: 8934 - RNA, 21 nt, artificial
  Oligomer
auggcaggagguuaauucucc

SEQ ID NO: 8935 - RNA, 21 nt, artificial
  Oligomer
aauccuauugguuaguauccu

SEQ ID NO: 8936 - RNA, 21 nt, artificial
  Oligomer
uauugguuaguauccuuagcc

SEQ ID NO: 8937 - RNA, 21 nt, artificial
  Oligomer
gugagauuccuguccaguugu

SEQ ID NO: 8938 - RNA, 21 nt, artificial
  Oligomer
gagauuccuguccaguugucu

SEQ ID NO: 8939 - RNA, 21 nt, artificial
  Oligomer
uuuggucuaugacaguaauag

SEQ ID NO: 8940 - RNA, 21 nt, artificial
  Oligomer
caaaacuuacuugaguauccg

SEQ ID NO: 8941 - RNA, 21 nt, artificial
  Oligomer
uuacuugaguauccgcucucu

SEQ ID NO: 8942 - RNA, 21 nt, artificial
  Oligomer
acugucacuaauaaguguuga

SEQ ID NO: 8943 - RNA, 21 nt, artificial
  Oligomer
gucacuaauaaguguugagac

SEQ ID NO: 8944 - RNA, 21 nt, artificial
  Oligomer
ucuuagggaaguuacugaacc

SEQ ID NO: 8945 - RNA, 21 nt, artificial
  Oligomer
gugcucucaaaaccauagagc

SEQ ID NO: 8946 - RNA, 21 nt, artificial
  Oligomer
auuauuugagcauuuggcagc

SEQ ID NO: 8947 - RNA, 21 nt, artificial
  Oligomer
auuuggcagcacaacccacau

SEQ ID NO: 8948 - RNA, 21 nt, artificial
  Oligomer
uauuuccucauggaagagaca

SEQ ID NO: 8949 - RNA, 21 nt, artificial
  Oligomer
ucagaguuggagaugcuuugu

SEQ ID NO: 8950 - RNA, 21 nt, artificial
  Oligomer
cacagaggaaaacuccuauuc

SEQ ID NO: 8951 - RNA, 21 nt, artificial
  Oligomer
ccugugaucacaucuuucucc

SEQ ID NO: 8952 - RNA, 21 nt, artificial
  Oligomer
cuuucuccucaucauggugca

SEQ ID NO: 8953 - RNA, 21 nt, artificial
  Oligomer
ucuuuuugagcuucagauugg

SEQ ID NO: 8954 - RNA, 21 nt, artificial
  Oligomer
uugagcuucagauugguggcg

SEQ ID NO: 8955 - RNA, 21 nt, artificial
  Oligomer
ugagcuucagauugguggcgu

SEQ ID NO: 8956 - RNA, 21 nt, artificial
  Oligomer
guggcguuauugcaauauuug

SEQ ID NO: 8957 - RNA, 21 nt, artificial
  Oligomer
caugcaguugaaauucaggca

SEQ ID NO: 8958 - RNA, 21 nt, artificial
  Oligomer
ugcaguugaaauucaggcagg

SEQ ID NO: 8959 - RNA, 21 nt, artificial
  Oligomer
acuccugcuuaucacagccac

SEQ ID NO: 8960 - RNA, 21 nt, artificial
  Oligomer
agccacaagcauugaacagcc

SEQ ID NO: 8961 - RNA, 21 nt, artificial
  Oligomer
auggauacuaaagaagucuuc

SEQ ID NO: 8962 - RNA, 21 nt, artificial
  Oligomer
uggauacuaaagaagucuucc

SEQ ID NO: 8963 - RNA, 21 nt, artificial
  Oligomer
uccagcaaacugagggauugg

SEQ ID NO: 8964 - RNA, 21 nt, artificial
  Oligomer
cuguuauauuaugcacagcca

SEQ ID NO: 8965 - RNA, 21 nt, artificial
  Oligomer
auaugaggcacagcgugauga

SEQ ID NO: 8966 - RNA, 21 nt, artificial
  Oligomer
uucgagcaaaauugagauaac

SEQ ID NO: 8967 - RNA, 21 nt, artificial
  Oligomer
aaguucagagagugcuacuga

SEQ ID NO: 8968 - RNA, 21 nt, artificial
  Oligomer
acaaacacaauugcaaaagca

SEQ ID NO: 8969 - RNA, 21 nt, artificial
  Oligomer
aaaaccuuggagaaacacucu

SEQ ID NO: 8970 - RNA, 21 nt, artificial
  Oligomer
gcacauagguuagaaagggcc

SEQ ID NO: 8971 - RNA, 21 nt, artificial
  Oligomer
gggccaauauucucagacucc

SEQ ID NO: 8972 - RNA, 21 nt, artificial
  Oligomer
ucucagacuccuuauaacuga

SEQ ID NO: 8973 - RNA, 21 nt, artificial
  Oligomer
uccuuauaacugagguacccu

SEQ ID NO: 8974 - RNA, 21 nt, artificial
  Oligomer
cuuauaacugagguacccucu

SEQ ID NO: 8975 - RNA, 21 nt, artificial
  Oligomer
gaugaauugauaccugaggug

SEQ ID NO: 8976 - RNA, 21 nt, artificial
  Oligomer
aagugucucuaagcagaaacc

SEQ ID NO: 8977 - RNA, 21 nt, artificial
  Oligomer
gucucuaagcagaaaccaucc

SEQ ID NO: 8978 - RNA, 21 nt, artificial
  Oligomer
gaaaccauccugguacauuuc

SEQ ID NO: 8979 - RNA, 21 nt, artificial
  Oligomer
aaaccauccugguacauuuca

SEQ ID NO: 8980 - RNA, 21 nt, artificial
  Oligomer
cagcaucaaaauuugugacca

SEQ ID NO: 8981 - RNA, 21 nt, artificial
  Oligomer
gggaaugaccaauaugagacc

SEQ ID NO: 8982 - RNA, 21 nt, artificial
  Oligomer
aacugguuuuaguucccagaa

SEQ ID NO: 8983 - RNA, 21 nt, artificial
  Oligomer
uaguucccagaaaugggagca

SEQ ID NO: 8984 - RNA, 21 nt, artificial
  Oligomer
augggagcaguucuaagaaca

SEQ ID NO: 8985 - RNA, 21 nt, artificial
  Oligomer
auuuagagacucucucuugaa

SEQ ID NO: 8986 - RNA, 21 nt, artificial
  Oligomer
gaauuugaucucuguauagag

SEQ ID NO: 8987 - RNA, 21 nt, artificial
  Oligomer
uagagauuuuuguuucugggu

SEQ ID NO: 8988 - RNA, 21 nt, artificial
  Oligomer
uauuuuauagcacaaggagca

SEQ ID NO: 8989 - RNA, 21 nt, artificial
  Oligomer
cuagaugagccagagucaugg

SEQ ID NO: 8990 - RNA, 21 nt, artificial
  Oligomer
gaaaggugagauuccugucca

SEQ ID NO: 8991 - RNA, 21 nt, artificial
  Oligomer
caugcuucaaauaagaaugug

SEQ ID NO: 8992 - RNA, 21 nt, artificial
  Oligomer
cccuucaggcaauccuauugg

SEQ ID NO: 8993 - RNA, 21 nt, artificial
  Oligomer
auccuauugguuaguauccuu

SEQ ID NO: 8994 - RNA, 21 nt, artificial
  Oligomer
ucagauuccuuuggucuauga

SEQ ID NO: 8995 - RNA, 21 nt, artificial
  Oligomer
gugugguucuaaauucauuca

SEQ ID NO: 8996 - RNA, 21 nt, artificial
  Oligomer
uacuugaguauccgcucucug

SEQ ID NO: 8997 - RNA, 21 nt, artificial
  Oligomer
gugguaaaugaugaguauuac

SEQ ID NO: 8998 - RNA, 21 nt, artificial
  Oligomer
aauaaguguugagacacucuc

SEQ ID NO: 8999 - RNA, 21 nt, artificial
  Oligomer
auagcuacuccuugguuuccu

SEQ ID NO: 9000 - RNA, 21 nt, artificial
  Oligomer
uugaggauucugaggcagcuc

SEQ ID NO: 9001 - RNA, 21 nt, artificial
  Oligomer
gaacucuuguugagcagcacg

SEQ ID NO: 9002 - RNA, 21 nt, artificial
  Oligomer
aacucuuguugagcagcacgc

SEQ ID NO: 9003 - RNA, 21 nt, artificial
  Oligomer
aaccuggaguaagaugggcua

SEQ ID NO: 9004 - RNA, 21 nt, artificial
  Oligomer
uaaucuuagggaaguuacuga

SEQ ID NO: 9005 - RNA, 21 nt, artificial
  Oligomer
aucuuugacauuccuuuaagg

SEQ ID NO: 9006 - RNA, 21 nt, artificial
  Oligomer
ucuuugacauuccuuuaaggg

SEQ ID NO: 9007 - RNA, 21 nt, artificial
  Oligomer
cauuccuuuaagggaaaacca

SEQ ID NO: 9008 - RNA, 21 nt, artificial
  Oligomer
gggaaaaccauuacauuauag

SEQ ID NO: 9009 - RNA, 21 nt, artificial
  Oligomer
agguccacagaggaaaacucc

SEQ ID NO: 9010 - RNA, 21 nt, artificial
  Oligomer
aacuccuauucugguauuagg

SEQ ID NO: 9011 - RNA, 21 nt, artificial
  Oligomer
acaaagucuuuuguuucaggc

SEQ ID NO: 9012 - RNA, 21 nt, artificial
  Oligomer
caaagucuuuuguuucaggcc

SEQ ID NO: 9013 - RNA, 21 nt, artificial
  Oligomer
cagcaugcaguugaaauucag

SEQ ID NO: 9014 - RNA, 21 nt, artificial
  Oligomer
cuuuuugagcuucagauuggu

SEQ ID NO: 9015 - RNA, 21 nt, artificial
  Oligomer
aaagggcccaucaaccgcuau

SEQ ID NO: 9016 - RNA, 21 nt, artificial
  Oligomer
uuugggcacuugacaaaaaug

SEQ ID NO: 9017 - RNA, 21 nt, artificial
  Oligomer
gacaaaaauguauugucccac

SEQ ID NO: 9018 - RNA, 21 nt, artificial
  Oligomer
caggguucuuuauucucuuuc

SEQ ID NO: 9019 - RNA, 21 nt, artificial
  Oligomer
gagauaacuuucauuuugccu

SEQ ID NO: 9020 - RNA, 21 nt, artificial
  Oligomer
ggaucagaauuauugacucgg

SEQ ID NO: 9021 - RNA, 21 nt, artificial
  Oligomer
ucgggcauucacacaccauuc

SEQ ID NO: 9022 - RNA, 21 nt, artificial
  Oligomer
caaacacaauugcaaaagcag

SEQ ID NO: 9023 - RNA, 21 nt, artificial
  Oligomer
uagaaagggccaauauucuca

SEQ ID NO: 9024 - RNA, 21 nt, artificial
  Oligomer
cucagacuccuuauaacugag

SEQ ID NO: 9025 - RNA, 21 nt, artificial
  Oligomer
aaacaauaaacagagccugac

SEQ ID NO: 9026 - RNA, 21 nt, artificial
  Oligomer
aauugauaccugaggugcagu

SEQ ID NO: 9027 - RNA, 21 nt, artificial
  Oligomer
gaccuaagugucucuaagcag

SEQ ID NO: 9028 - RNA, 21 nt, artificial
  Oligomer
agugucucuaagcagaaacca

SEQ ID NO: 9029 - RNA, 21 nt, artificial
  Oligomer
ugaaucgcagagugaagugca

SEQ ID NO: 9030 - RNA, 21 nt, artificial
  Oligomer
ccucagcaucaaaauuuguga

SEQ ID NO: 9031 - RNA, 21 nt, artificial
  Oligomer
cuccuaaaccagucuucugcc

SEQ ID NO: 9032 - RNA, 21 nt, artificial
  Oligomer
uuaguucccagaaaugggagc

SEQ ID NO: 9033 - RNA, 21 nt, artificial
  Oligomer
agaacauacuauugaguguga

SEQ ID NO: 9034 - RNA, 21 nt, artificial
  Oligomer
ucuggguuguuaauuuuagga

SEQ ID NO: 9035 - RNA, 21 nt, artificial
  Oligomer
acagaugcgauccauuuugug

SEQ ID NO: 9036 - RNA, 21 nt, artificial
  Oligomer
ugccaccauuuuaugaaaggu

SEQ ID NO: 9037 - RNA, 21 nt, artificial
  Oligomer
gaugcgauccauuuugugugu

SEQ ID NO: 9038 - RNA, 21 nt, artificial
  Oligomer
augcgauccauuuugugugug

SEQ ID NO: 9039 - RNA, 21 nt, artificial
  Oligomer
aucagauuccuuuggucuaug

SEQ ID NO: 9040 - RNA, 21 nt, artificial
  Oligomer
uucuucuguagaaagaacauc

SEQ ID NO: 9041 - RNA, 21 nt, artificial
  Oligomer
guugucuucgaacucuuguug

SEQ ID NO: 9042 - RNA, 21 nt, artificial
  Oligomer
caaaccuggaguaagaugggc

SEQ ID NO: 9043 - RNA, 21 nt, artificial
  Oligomer
uagggaaguuacugaaccuuu

SEQ ID NO: 9044 - RNA, 21 nt, artificial
  Oligomer
agugcucucaaaaccauagag

SEQ ID NO: 9045 - RNA, 21 nt, artificial
  Oligomer
ugcucucaaaaccauagagcu

SEQ ID NO: 9046 - RNA, 21 nt, artificial
  Oligomer
acauuccuuuaagggaaaacc

SEQ ID NO: 9047 - RNA, 21 nt, artificial
  Oligomer
uuauuugagcauuuggcagca

SEQ ID NO: 9048 - RNA, 21 nt, artificial
  Oligomer
auuugagcauuuggcagcaca

SEQ ID NO: 9049 - RNA, 21 nt, artificial
  Oligomer
cagacuggcaagagaaucagc

SEQ ID NO: 9050 - RNA, 21 nt, artificial
  Oligomer
cacagcaaagugauuggccug

SEQ ID NO: 9051 - RNA, 21 nt, artificial
  Oligomer
aaccacucaaaggcaugugug

SEQ ID NO: 9052 - RNA, 21 nt, artificial
  Oligomer
gcaguugaaauucaggcaggc

SEQ ID NO: 9053 - RNA, 21 nt, artificial
  Oligomer
uugaaauucaggcaggcugca

SEQ ID NO: 9054 - RNA, 21 nt, artificial
  Oligomer
cuaucuuagguaguuuccacg

SEQ ID NO: 9055 - RNA, 21 nt, artificial
  Oligomer
ucgaugguuuugaaaggguga

SEQ ID NO: 9056 - RNA, 21 nt, artificial
  Oligomer
aaagggugagugaccaccuug

SEQ ID NO: 9057 - RNA, 21 nt, artificial
  Oligomer
ugggacccacuauccauuucc

SEQ ID NO: 9058 - RNA, 21 nt, artificial
  Oligomer
cauuuccaagucauaggaggg

SEQ ID NO: 9059 - RNA, 21 nt, artificial
  Oligomer
ucacaaagagaugaugugugu

SEQ ID NO: 9060 - RNA, 21 nt, artificial
  Oligomer
uuggagaaacacucucggagc

SEQ ID NO: 9061 - RNA, 21 nt, artificial
  Oligomer
augugcaauggugugaaucgc

SEQ ID NO: 9062 - RNA, 21 nt, artificial
  Oligomer
uggaccuaagugucucuaagc

SEQ ID NO: 9063 - RNA, 21 nt, artificial
  Oligomer
aagcagaaaccauccugguac

SEQ ID NO: 9064 - RNA, 21 nt, artificial
  Oligomer
gacaaagaacaacugaguucu

SEQ ID NO: 9065 - RNA, 21 nt, artificial
  Oligomer
ucaaaacaacaucaguaugug

SEQ ID NO: 9066 - RNA, 21 nt, artificial
  Oligomer
agauuuuuguuucuggguugu

SEQ ID NO: 9067 - RNA, 21 nt, artificial
  Oligomer
cacagaugcgauccauuuugu

SEQ ID NO: 9068 - RNA, 21 nt, artificial
  Oligomer
aagaaugugcagaacccuuca

SEQ ID NO: 9069 - RNA, 21 nt, artificial
  Oligomer
uuggucuaugacaguaauaga

SEQ ID NO: 9070 - RNA, 21 nt, artificial
  Oligomer
acaaaacuuacuugaguaucc

SEQ ID NO: 9071 - RNA, 21 nt, artificial
  Oligomer
uagaaagaacaucuggcccag

SEQ ID NO: 9072 - RNA, 21 nt, artificial
  Oligomer
guugagacacucucaacaugu

SEQ ID NO: 9073 - RNA, 21 nt, artificial
  Oligomer
cuucgaacucuuguugagcag

SEQ ID NO: 9074 - RNA, 21 nt, artificial
  Oligomer
auauauagcuacuccuugguu

SEQ ID NO: 9075 - RNA, 21 nt, artificial
  Oligomer
ugguuuccuucuucuuuuggg

SEQ ID NO: 9076 - RNA, 21 nt, artificial
  Oligomer
aaucuuagggaaguuacugaa

SEQ ID NO: 9077 - RNA, 21 nt, artificial
  Oligomer
cuuagggaaguuacugaaccu

SEQ ID NO: 9078 - RNA, 21 nt, artificial
  Oligomer
uuagggaaguuacugaaccuu

SEQ ID NO: 9079 - RNA, 21 nt, artificial
  Oligomer
uccacugacauuacugagagg

SEQ ID NO: 9080 - RNA, 21 nt, artificial
  Oligomer
cucucaaaaccauagagcucc

SEQ ID NO: 9081 - RNA, 21 nt, artificial
  Oligomer
cauuauuugagcauuuggcag

SEQ ID NO: 9082 - RNA, 21 nt, artificial
  Oligomer
gagacaaguuagaaguuuucc

SEQ ID NO: 9083 - RNA, 21 nt, artificial
  Oligomer
acagacuggcaagagaaucag

SEQ ID NO: 9084 - RNA, 21 nt, artificial
  Oligomer
ucuuucuccucaucauggugc

SEQ ID NO: 9085 - RNA, 21 nt, artificial
  Oligomer
aaaccacucaaaggcaugugu

SEQ ID NO: 9086 - RNA, 21 nt, artificial
  Oligomer
cacucaaaggcaugugugucc

SEQ ID NO: 9087 - RNA, 21 nt, artificial
  Oligomer
ucagauugguggcguuauugc

SEQ ID NO: 9088 - RNA, 21 nt, artificial
  Oligomer
agcugaacacaucuucacugg

SEQ ID NO: 9089 - RNA, 21 nt, artificial
  Oligomer
cuuguguaaaagaacuuaggu

SEQ ID NO: 9090 - RNA, 21 nt, artificial
  Oligomer
cucgaugguuuugaaagggug

SEQ ID NO: 9091 - RNA, 21 nt, artificial
  Oligomer
auccauuuccaagucauagga

SEQ ID NO: 9092 - RNA, 21 nt, artificial
  Oligomer
uccaagucauaggaggguuuc

SEQ ID NO: 9093 - RNA, 21 nt, artificial
  Oligomer
cauggauggcaaggccaauga

SEQ ID NO: 9094 - RNA, 21 nt, artificial
  Oligomer
aagaucacaaagagaugaugu

SEQ ID NO: 9095 - RNA, 21 nt, artificial
  Oligomer
ucauaaacccgguaauaccag

SEQ ID NO: 9096 - RNA, 21 nt, artificial
  Oligomer
ccucuccaguucauacuuugg

SEQ ID NO: 9097 - RNA, 21 nt, artificial
  Oligomer
cuccaguucauacuuuggugu

SEQ ID NO: 9098 - RNA, 21 nt, artificial
  Oligomer
gaaacaauaaacagagccuga

SEQ ID NO: 9099 - RNA, 21 nt, artificial
  Oligomer
caauaaacagagccugacuca

SEQ ID NO: 9100 - RNA, 21 nt, artificial
  Oligomer
ccugguacauuucagaaaggc

SEQ ID NO: 9101 - RNA, 21 nt, artificial
  Oligomer
cugguacauuucagaaaggcu

SEQ ID NO: 9102 - RNA, 21 nt, artificial
  Oligomer
acgaaaggaauaguaguauga

SEQ ID NO: 9103 - RNA, 21 nt, artificial
  Oligomer
agcaucaaaauuugugaccag

SEQ ID NO: 9104 - RNA, 21 nt, artificial
  Oligomer
aguauguguauaccuccuuca

SEQ ID NO: 9105 - RNA, 21 nt, artificial
  Oligomer
ucuuccucauuaccgaaguug

SEQ ID NO: 9106 - RNA, 21 nt, artificial
  Oligomer
agugcaaucauccaugccacc

SEQ ID NO: 9107 - RNA, 21 nt, artificial
  Oligomer
gaaguugaagaguucuaaaca

SEQ ID NO: 9108 - RNA, 21 nt, artificial
  Oligomer
ucuuggccacacuaacaguga

SEQ ID NO: 9109 - RNA, 21 nt, artificial
  Oligomer
acuaacagugauuuagagacu

SEQ ID NO: 9110 - RNA, 21 nt, artificial
  Oligomer
cagaacauacuauugagugug

SEQ ID NO: 9111 - RNA, 21 nt, artificial
  Oligomer
ugagugugaauuugaucucug

SEQ ID NO: 9112 - RNA, 21 nt, artificial
  Oligomer
gagugugaauuugaucucugu

SEQ ID NO: 9113 - RNA, 21 nt, artificial
  Oligomer
gagauuuuuguuucuggguug

SEQ ID NO: 9114 - RNA, 21 nt, artificial
  Oligomer
uuuuguguguguauuuacgga

SEQ ID NO: 9115 - RNA, 21 nt, artificial
  Oligomer
agcuggagaagaccacuuugg

SEQ ID NO: 9116 - RNA, 21 nt, artificial
  Oligomer
aggagguuaauucuccaccuc

SEQ ID NO: 9117 - RNA, 21 nt, artificial
  Oligomer
ugcuucaaauaagaaugugca

SEQ ID NO: 9118 - RNA, 21 nt, artificial
  Oligomer
auugguuaguauccuuagccu

SEQ ID NO: 9119 - RNA, 21 nt, artificial
  Oligomer
agggagaaucagauuccuuug

SEQ ID NO: 9120 - RNA, 21 nt, artificial
  Oligomer
agaaucagauuccuuuggucu

SEQ ID NO: 9121 - RNA, 21 nt, artificial
  Oligomer
acuugaguauccgcucucugc

SEQ ID NO: 9122 - RNA, 21 nt, artificial
  Oligomer
augcucagaugucaauacugu

SEQ ID NO: 9123 - RNA, 21 nt, artificial
  Oligomer
caauacugucacuaauaagug

SEQ ID NO: 9124 - RNA, 21 nt, artificial
  Oligomer
cugucacuaauaaguguugag

SEQ ID NO: 9125 - RNA, 21 nt, artificial
  Oligomer
ugaggcagcucaguauugugg

SEQ ID NO: 9126 - RNA, 21 nt, artificial
  Oligomer
ucucaaaaccauagagcucca

SEQ ID NO: 9127 - RNA, 21 nt, artificial
  Oligomer
cucauggaagagacaaguuag

SEQ ID NO: 9128 - RNA, 21 nt, artificial
  Oligomer
acaaguuagaaguuuuccuug

SEQ ID NO: 9129 - RNA, 21 nt, artificial
  Oligomer
agucuuuuguuucaggccugu

SEQ ID NO: 9130 - RNA, 21 nt, artificial
  Oligomer
guuccuuuccugcaucuggcu

SEQ ID NO: 9131 - RNA, 21 nt, artificial
  Oligomer
aucuuuuugagcuucagauug

SEQ ID NO: 9132 - RNA, 21 nt, artificial
  Oligomer
accagacugacuugagaaugg

SEQ ID NO: 9133 - RNA, 21 nt, artificial
  Oligomer
gcugaacacaucuucacuggc

SEQ ID NO: 9134 - RNA, 21 nt, artificial
  Oligomer
acacaucuucacuggcagugc

SEQ ID NO: 9135 - RNA, 21 nt, artificial
  Oligomer
ugcuuaucacagccacaagca

SEQ ID NO: 9136 - RNA, 21 nt, artificial
  Oligomer
aguguaaaagggugccacucc

SEQ ID NO: 9137 - RNA, 21 nt, artificial
  Oligomer
ucuuguguaaaagaacuuagg

SEQ ID NO: 9138 - RNA, 21 nt, artificial
  Oligomer
uccauuuccaagucauaggag

SEQ ID NO: 9139 - RNA, 21 nt, artificial
  Oligomer
uuccaagucauaggaggguuu

SEQ ID NO: 9140 - RNA, 21 nt, artificial
  Oligomer
ucuuucgagcaaaauugagau

SEQ ID NO: 9141 - RNA, 21 nt, artificial
  Oligomer
uaucucauaacuggauaacac

SEQ ID NO: 9142 - RNA, 21 nt, artificial
  Oligomer
cucuaagcagaaaccauccug

SEQ ID NO: 9143 - RNA, 21 nt, artificial
  Oligomer
acaaagaacaacugaguucuu

SEQ ID NO: 9144 - RNA, 21 nt, artificial
  Oligomer
cuuccucauuaccgaaguuga

SEQ ID NO: 9145 - RNA, 21 nt, artificial
  Oligomer
aaacugguuuuaguucccaga

SEQ ID NO: 9146 - RNA, 21 nt, artificial
  Oligomer
aguucccagaaaugggagcag

SEQ ID NO: 9147 - RNA, 21 nt, artificial
  Oligomer
uuuguguguguauuuacggaa

SEQ ID NO: 9148 - RNA, 21 nt, artificial
  Oligomer
ggagguuaauucuccaccucc

SEQ ID NO: 9149 - RNA, 21 nt, artificial
  Oligomer
gcuucaaauaagaaugugcag

SEQ ID NO: 9150 - RNA, 21 nt, artificial
  Oligomer
cccuagggagaaucagauucc

SEQ ID NO: 9151 - RNA, 21 nt, artificial
  Oligomer
uugaguauccgcucucugcca

SEQ ID NO: 9152 - RNA, 21 nt, artificial
  Oligomer
uucuguagaaagaacaucugg

SEQ ID NO: 9153 - RNA, 21 nt, artificial
  Oligomer
ucuguagaaagaacaucuggc

SEQ ID NO: 9154 - RNA, 21 nt, artificial
  Oligomer
ucagaugucaauacugucacu

SEQ ID NO: 9155 - RNA, 21 nt, artificial
  Oligomer
aaguguugagacacucucaac

SEQ ID NO: 9156 - RNA, 21 nt, artificial
  Oligomer
gucuucgaacucuuguugagc

SEQ ID NO: 9157 - RNA, 21 nt, artificial
  Oligomer
agcuacuccuugguuuccuuc

SEQ ID NO: 9158 - RNA, 21 nt, artificial
  Oligomer
gaggcagcucaguauugugga

SEQ ID NO: 9159 - RNA, 21 nt, artificial
  Oligomer
accuggaguaagaugggcuag

SEQ ID NO: 9160 - RNA, 21 nt, artificial
  Oligomer
ucaaacaaucuuugacauucc

SEQ ID NO: 9161 - RNA, 21 nt, artificial
  Oligomer
uuccucauggaagagacaagu

SEQ ID NO: 9162 - RNA, 21 nt, artificial
  Oligomer
cugugaucacaucuuucuccu

SEQ ID NO: 9163 - RNA, 21 nt, artificial
  Oligomer
auuggccugagacucauccca

SEQ ID NO: 9164 - RNA, 21 nt, artificial
  Oligomer
gcguuauugcaauauuuguac

SEQ ID NO: 9165 - RNA, 21 nt, artificial
  Oligomer
auagcugaacacaucuucacu

SEQ ID NO: 9166 - RNA, 21 nt, artificial
  Oligomer
uuuugaaagggugagugacca

SEQ ID NO: 9167 - RNA, 21 nt, artificial
  Oligomer
ugaaagggugagugaccaccu

SEQ ID NO: 9168 - RNA, 21 nt, artificial
  Oligomer
auuuccaagucauaggagggu

SEQ ID NO: 9169 - RNA, 21 nt, artificial
  Oligomer
uuuccaagucauaggaggguu

SEQ ID NO: 9170 - RNA, 21 nt, artificial
  Oligomer
ugacaacuccagugaugccug

SEQ ID NO: 9171 - RNA, 21 nt, artificial
  Oligomer
ucucuuucgagcaaaauugag

SEQ ID NO: 9172 - RNA, 21 nt, artificial
  Oligomer
cgaaaggaauaguaguaugac

SEQ ID NO: 9173 - RNA, 21 nt, artificial
  Oligomer
uccuaaaccagucuucugccc

SEQ ID NO: 9174 - RNA, 21 nt, artificial
  Oligomer
ggcaaauaaaacugguuuuag

SEQ ID NO: 9175 - RNA, 21 nt, artificial
  Oligomer
cuauugagugugaauuugauc

SEQ ID NO: 9176 - RNA, 21 nt, artificial
  Oligomer
ugcgauccauuuugugugugu

SEQ ID NO: 9177 - RNA, 21 nt, artificial
  Oligomer
uggcaggagguuaauucucca

SEQ ID NO: 9178 - RNA, 21 nt, artificial
  Oligomer
augugcagaacccuucaggca

SEQ ID NO: 9179 - RNA, 19 nt, artificial
  Oligomer
cccuauuugacuccgauag

SEQ ID NO: 9180 - RNA, 19 nt, artificial
  Oligomer
cuauuugacuccgauagaa

SEQ ID NO: 9181 - RNA, 19 nt, artificial
  Oligomer
agauacuuuuggagaaaca

SEQ ID NO: 9182 - RNA, 19 nt, artificial
  Oligomer
cugagauacuuuuggagaa

SEQ ID NO: 9183 - RNA, 19 nt, artificial
  Oligomer
cccuuuuuuucacuauaga

SEQ ID NO: 9184 - RNA, 19 nt, artificial
  Oligomer
gugccuggaaucuuguuuu

SEQ ID NO: 9185 - RNA, 19 nt, artificial
  Oligomer
gaacuuuguacuccaggcu

SEQ ID NO: 9186 - RNA, 19 nt, artificial
  Oligomer
gagauacuuuuggagaaac

SEQ ID NO: 9187 - RNA, 19 nt, artificial
  Oligomer
ggcuguaugaguccuucaa

SEQ ID NO: 9188 - RNA, 19 nt, artificial
  Oligomer
agggcucugagauacuuuu

SEQ ID NO: 9189 - RNA, 19 nt, artificial
  Oligomer
gaaucuuguuuuuccugga

SEQ ID NO: 9190 - RNA, 19 nt, artificial
  Oligomer
ggugccuggaaucuuguuu

SEQ ID NO: 9191 - RNA, 19 nt, artificial
  Oligomer
acacugugaacuuuguacu

SEQ ID NO: 9192 - RNA, 19 nt, artificial
  Oligomer
ugcugacuaaacuggagau

SEQ ID NO: 9193 - RNA, 19 nt, artificial
  Oligomer
ccuauuugacuccgauaga

SEQ ID NO: 9194 - RNA, 19 nt, artificial
  Oligomer
gcaguuuaagaccauugca

SEQ ID NO: 9195 - RNA, 19 nt, artificial
  Oligomer
gcugacuaaacuggagaug

SEQ ID NO: 9196 - RNA, 19 nt, artificial
  Oligomer
agaaaagaaagcauacuug

SEQ ID NO: 9197 - RNA, 19 nt, artificial
  Oligomer
uacuuuuggagaaacacaa

SEQ ID NO: 9198 - RNA, 19 nt, artificial
  Oligomer
ccaagagaauuucuagccu

SEQ ID NO: 9199 - RNA, 19 nt, artificial
  Oligomer
ccauucugcagaguaucau

SEQ ID NO: 9200 - RNA, 19 nt, artificial
  Oligomer
gggcucugagauacuuuug

SEQ ID NO: 9201 - RNA, 19 nt, artificial
  Oligomer
ggacaaacaggcuguauga

SEQ ID NO: 9202 - RNA, 19 nt, artificial
  Oligomer
cccauggacaaacucaaau

SEQ ID NO: 9203 - RNA, 19 nt, artificial
  Oligomer
ugcaugugaaagaguccuu

SEQ ID NO: 9204 - RNA, 19 nt, artificial
  Oligomer
cagcaguuuaagaccauug

SEQ ID NO: 9205 - RNA, 19 nt, artificial
  Oligomer
ucauguuguaucuggaauu

SEQ ID NO: 9206 - RNA, 19 nt, artificial
  Oligomer
acaggcaccagaaaagaaa

SEQ ID NO: 9207 - RNA, 19 nt, artificial
  Oligomer
ggcucugagauacuuuugg

SEQ ID NO: 9208 - RNA, 19 nt, artificial
  Oligomer
ccaagggcucugagauacu

SEQ ID NO: 9209 - RNA, 19 nt, artificial
  Oligomer
ucagccugcaagaauucaa

SEQ ID NO: 9210 - RNA, 19 nt, artificial
  Oligomer
uggacuuuaucuggaucaa

SEQ ID NO: 9211 - RNA, 19 nt, artificial
  Oligomer
aggucacucaucuccucau

SEQ ID NO: 9212 - RNA, 19 nt, artificial
  Oligomer
ccgugugcaucauggaagu

SEQ ID NO: 9213 - RNA, 19 nt, artificial
  Oligomer
cagccugcaagaauucaaa

SEQ ID NO: 9214 - RNA, 19 nt, artificial
  Oligomer
gggccauugugagaaguuc

SEQ ID NO: 9215 - RNA, 19 nt, artificial
  Oligomer
agcaagguguuccagaaag

SEQ ID NO: 9216 - RNA, 19 nt, artificial
  Oligomer
cugcugacuaaacuggaga

SEQ ID NO: 9217 - RNA, 19 nt, artificial
  Oligomer
ccugcugacuaaacuggag

SEQ ID NO: 9218 - RNA, 19 nt, artificial
  Oligomer
ggacuuuaucuggaucaac

SEQ ID NO: 9219 - RNA, 19 nt, artificial
  Oligomer
agguggacuuuaucuggau

SEQ ID NO: 9220 - RNA, 19 nt, artificial
  Oligomer
gucauguuguaucuggaau

SEQ ID NO: 9221 - RNA, 19 nt, artificial
  Oligomer
cucugagauacuuuuggag

SEQ ID NO: 9222 - RNA, 19 nt, artificial
  Oligomer
agagucaaaggucguccaa

SEQ ID NO: 9223 - RNA, 19 nt, artificial
  Oligomer
ugccuggaaucuuguuuuu

SEQ ID NO: 9224 - RNA, 19 nt, artificial
  Oligomer
uaccacuggaccagaacau

SEQ ID NO: 9225 - RNA, 19 nt, artificial
  Oligomer
acaaacucaaauuccucuu

SEQ ID NO: 9226 - RNA, 19 nt, artificial
  Oligomer
ugggcaagaaugacaugaa

SEQ ID NO: 9227 - RNA, 19 nt, artificial
  Oligomer
gcagucauguuguaucugg

SEQ ID NO: 9228 - RNA, 19 nt, artificial
  Oligomer
gacaaugagaaagagucaa

SEQ ID NO: 9229 - RNA, 19 nt, artificial
  Oligomer
gcuguaugaguccuucaag

SEQ ID NO: 9230 - RNA, 19 nt, artificial
  Oligomer
uggacaaacaggcuguaug

SEQ ID NO: 9231 - RNA, 19 nt, artificial
  Oligomer
cgaggucucaauccauugc

SEQ ID NO: 9232 - RNA, 19 nt, artificial
  Oligomer
ccuuuuuuucacuauagac

SEQ ID NO: 9233 - RNA, 19 nt, artificial
  Oligomer
ugugcaucauggaagucaa

SEQ ID NO: 9234 - RNA, 19 nt, artificial
  Oligomer
ucaucuuucaugggcccaa

SEQ ID NO: 9235 - RNA, 19 nt, artificial
  Oligomer
ugcuccuccucauguucau

SEQ ID NO: 9236 - RNA, 19 nt, artificial
  Oligomer
gcaagaauucaaagcagcu

SEQ ID NO: 9237 - RNA, 19 nt, artificial
  Oligomer
agcggucuuucgagugguu

SEQ ID NO: 9238 - RNA, 19 nt, artificial
  Oligomer
ccagaaaagaaagcauacu

SEQ ID NO: 9239 - RNA, 19 nt, artificial
  Oligomer
caaugagaaagagucaaag

SEQ ID NO: 9240 - RNA, 19 nt, artificial
  Oligomer
cugguaugcagucauguug

SEQ ID NO: 9241 - RNA, 19 nt, artificial
  Oligomer
aggagugugacaaugagaa

SEQ ID NO: 9242 - RNA, 19 nt, artificial
  Oligomer
guggacaaacaggcuguau

SEQ ID NO: 9243 - RNA, 19 nt, artificial
  Oligomer
ccaaggucacucaucuccu

SEQ ID NO: 9244 - RNA, 19 nt, artificial
  Oligomer
ugcugcuccuccucauguu

SEQ ID NO: 9245 - RNA, 19 nt, artificial
  Oligomer
caagaauucaaagcagcuc

SEQ ID NO: 9246 - RNA, 19 nt, artificial
  Oligomer
agggccauugugagaaguu

SEQ ID NO: 9247 - RNA, 19 nt, artificial
  Oligomer
ugaagggccauugugagaa

SEQ ID NO: 9248 - RNA, 19 nt, artificial
  Oligomer
guggacuuuaucuggauca

SEQ ID NO: 9249 - RNA, 19 nt, artificial
  Oligomer
uccaagacaacaugaagcu

SEQ ID NO: 9250 - RNA, 19 nt, artificial
  Oligomer
cagaaaagaaagcauacuu

SEQ ID NO: 9251 - RNA, 19 nt, artificial
  Oligomer
gcaccagaaaagaaagcau

SEQ ID NO: 9252 - RNA, 19 nt, artificial
  Oligomer
gcuuccauucugcagagua

SEQ ID NO: 9253 - RNA, 19 nt, artificial
  Oligomer
gcuacaucgaugggccuua

SEQ ID NO: 9254 - RNA, 19 nt, artificial
  Oligomer
caaacaggcuguaugaguc

SEQ ID NO: 9255 - RNA, 19 nt, artificial
  Oligomer
acacuaucuggcugcacau

SEQ ID NO: 9256 - RNA, 19 nt, artificial
  Oligomer
cugagcagaaagacacuau

SEQ ID NO: 9257 - RNA, 19 nt, artificial
  Oligomer
ccugagcagaaagacacua

SEQ ID NO: 9258 - RNA, 19 nt, artificial
  Oligomer
gacuacuuguaucugaaca

SEQ ID NO: 9259 - RNA, 19 nt, artificial
  Oligomer
ccgaggucucaauccauug

SEQ ID NO: 9260 - RNA, 19 nt, artificial
  Oligomer
accuggugacuacuuguau

SEQ ID NO: 9261 - RNA, 19 nt, artificial
  Oligomer
agguguaugacaucgaugu

SEQ ID NO: 9262 - RNA, 19 nt, artificial
  Oligomer
ugggugacucagcaguuua

SEQ ID NO: 9263 - RNA, 19 nt, artificial
  Oligomer
agaauuucuagccucaccu

SEQ ID NO: 9264 - RNA, 19 nt, artificial
  Oligomer
aaguucggcuucagauuuu

SEQ ID NO: 9265 - RNA, 19 nt, artificial
  Oligomer
gccauugugagaaguucgg

SEQ ID NO: 9266 - RNA, 19 nt, artificial
  Oligomer
gcaagaaugacaugaaggc

SEQ ID NO: 9267 - RNA, 19 nt, artificial
  Oligomer
gguggacuuuaucuggauc

SEQ ID NO: 9268 - RNA, 19 nt, artificial
  Oligomer
agaguaucauguacaggca

SEQ ID NO: 9269 - RNA, 19 nt, artificial
  Oligomer
cagucauguuguaucugga

SEQ ID NO: 9270 - RNA, 19 nt, artificial
  Oligomer
guaugcagucauguuguau

SEQ ID NO: 9271 - RNA, 19 nt, artificial
  Oligomer
gugugacaaugagaaagag

SEQ ID NO: 9272 - RNA, 19 nt, artificial
  Oligomer
gguucuaagaggcugucga

SEQ ID NO: 9273 - RNA, 19 nt, artificial
  Oligomer
cgugguucuaagaggcugu

SEQ ID NO: 9274 - RNA, 19 nt, artificial
  Oligomer
aguggacaaacaggcugua

SEQ ID NO: 9275 - RNA, 19 nt, artificial
  Oligomer
gacacuaucuggcugcaca

SEQ ID NO: 9276 - RNA, 19 nt, artificial
  Oligomer
gugugcaucauggaaguca

SEQ ID NO: 9277 - RNA, 19 nt, artificial
  Oligomer
agguguucuauuggacuca

SEQ ID NO: 9278 - RNA, 19 nt, artificial
  Oligomer
gagguguucuauuggacuc

SEQ ID NO: 9279 - RNA, 19 nt, artificial
  Oligomer
cuccuccucauguucaucu

SEQ ID NO: 9280 - RNA, 19 nt, artificial
  Oligomer
uccagguguaugacaucga

SEQ ID NO: 9281 - RNA, 19 nt, artificial
  Oligomer
uccgauagaaguggcacca

SEQ ID NO: 9282 - RNA, 19 nt, artificial
  Oligomer
cgauucuuugcccuauuug

SEQ ID NO: 9283 - RNA, 19 nt, artificial
  Oligomer
ucagcaguuuaagaccauu

SEQ ID NO: 9284 - RNA, 19 nt, artificial
  Oligomer
agcccuuaguccuucuagu

SEQ ID NO: 9285 - RNA, 19 nt, artificial
  Oligomer
aguucggcuucagauuuuu

SEQ ID NO: 9286 - RNA, 19 nt, artificial
  Oligomer
cacugggcaagaaugacau

SEQ ID NO: 9287 - RNA, 19 nt, artificial
  Oligomer
ugcagaguaucauguacag

SEQ ID NO: 9288 - RNA, 19 nt, artificial
  Oligomer
cugcagaguaucauguaca

SEQ ID NO: 9289 - RNA, 19 nt, artificial
  Oligomer
cuuuuggagaaacacaaau

SEQ ID NO: 9290 - RNA, 19 nt, artificial
  Oligomer
agugugacaaugagaaaga

SEQ ID NO: 9291 - RNA, 19 nt, artificial
  Oligomer
gugguucuaagaggcuguc

SEQ ID NO: 9292 - RNA, 19 nt, artificial
  Oligomer
cacuaucuggcugcacauu

SEQ ID NO: 9293 - RNA, 19 nt, artificial
  Oligomer
gccuggaaucuuguuuuuc

SEQ ID NO: 9294 - RNA, 19 nt, artificial
  Oligomer
uccuccucauguucaucug

SEQ ID NO: 9295 - RNA, 19 nt, artificial
  Oligomer
ugacaucgaugugugugca

SEQ ID NO: 9296 - RNA, 19 nt, artificial
  Oligomer
guguaugacaucgaugugu

SEQ ID NO: 9297 - RNA, 19 nt, artificial
  Oligomer
ucuuugcagagcgauucuu

SEQ ID NO: 9298 - RNA, 19 nt, artificial
  Oligomer
cccuuaguccuucuaguug

SEQ ID NO: 9299 - RNA, 19 nt, artificial
  Oligomer
cucagcaguuuaagaccau

SEQ ID NO: 9300 - RNA, 19 nt, artificial
  Oligomer
guaucuggaauuggugggu

SEQ ID NO: 9301 - RNA, 19 nt, artificial
  Oligomer
caccagaaaagaaagcaua

SEQ ID NO: 9302 - RNA, 19 nt, artificial
  Oligomer
gucgaggagugugacaaug

SEQ ID NO: 9303 - RNA, 19 nt, artificial
  Oligomer
gaaagacacuaucuggcug

SEQ ID NO: 9304 - RNA, 19 nt, artificial
  Oligomer
ucuuguuuuuccuggagaa

SEQ ID NO: 9305 - RNA, 19 nt, artificial
  Oligomer
gcuucugcucaucuuucau

SEQ ID NO: 9306 - RNA, 19 nt, artificial
  Oligomer
guccuucuaguugcgcuuu

SEQ ID NO: 9307 - RNA, 19 nt, artificial
  Oligomer
aguccuucuaguugcgcuu

SEQ ID NO: 9308 - RNA, 19 nt, artificial
  Oligomer
ggagaaacacaaauucugu

SEQ ID NO: 9309 - RNA, 19 nt, artificial
  Oligomer
ucuuccagguguaugacau

SEQ ID NO: 9310 - RNA, 19 nt, artificial
  Oligomer
gcccuauuugacuccgaua

SEQ ID NO: 9311 - RNA, 19 nt, artificial
  Oligomer
caguuuaagaccauugcag

SEQ ID NO: 9312 - RNA, 19 nt, artificial
  Oligomer
ugcccuauuugacuccgau

SEQ ID NO: 9313 - RNA, 19 nt, artificial
  Oligomer
ggccaacaaggagaagaaa

SEQ ID NO: 9314 - RNA, 19 nt, artificial
  Oligomer
gccacuuugagguguucua

SEQ ID NO: 9315 - RNA, 19 nt, artificial
  Oligomer
uccuucuaguugcgcuuuu

SEQ ID NO: 9316 - RNA, 19 nt, artificial
  Oligomer
uggccaacaaggagaagaa

SEQ ID NO: 9317 - RNA, 19 nt, artificial
  Oligomer
gagaaacacaaauucugua

SEQ ID NO: 9318 - RNA, 19 nt, artificial
  Oligomer
ccaccauugcucgcuauga

SEQ ID NO: 9319 - RNA, 19 nt, artificial
  Oligomer
ggcucacacugugaacuuu

SEQ ID NO: 9320 - RNA, 19 nt, artificial
  Oligomer
agcgauucuuugcccuauu

SEQ ID NO: 9321 - RNA, 19 nt, artificial
  Oligomer
uggcucacacugugaacuu

SEQ ID NO: 9322 - RNA, 19 nt, artificial
  Oligomer
ggagaagaaagacuccauc

SEQ ID NO: 9323 - RNA, 19 nt, artificial
  Oligomer
gcggucuuucgagugguuu

SEQ ID NO: 9324 - RNA, 19 nt, artificial
  Oligomer
acagagaccagcggucuuu

SEQ ID NO: 9325 - RNA, 19 nt, artificial
  Oligomer
ggaaucuuguuuuuccugg

SEQ ID NO: 9326 - RNA, 19 nt, artificial
  Oligomer
gcuuauccgaggucucaau

SEQ ID NO: 9327 - RNA, 19 nt, artificial
  Oligomer
cugugaacuuuguacucca

SEQ ID NO: 9328 - RNA, 19 nt, artificial
  Oligomer
cggcuucagauuuuuccaa

SEQ ID NO: 9329 - RNA, 19 nt, artificial
  Oligomer
ggguucuuggucucacuga

SEQ ID NO: 9330 - RNA, 19 nt, artificial
  Oligomer
guggguucuuggucucacu

SEQ ID NO: 9331 - RNA, 19 nt, artificial
  Oligomer
guggccacuuugagguguu

SEQ ID NO: 9332 - RNA, 19 nt, artificial
  Oligomer
ccagaacauccaguuccac

SEQ ID NO: 9333 - RNA, 19 nt, artificial
  Oligomer
ucaacuucgacugcagcuu

SEQ ID NO: 9334 - RNA, 19 nt, artificial
  Oligomer
ccuucuaguugcgcuuuug

SEQ ID NO: 9335 - RNA, 19 nt, artificial
  Oligomer
caagaaugaagccgcagac

SEQ ID NO: 9336 - RNA, 19 nt, artificial
  Oligomer
aggagaagaaagacuccau

SEQ ID NO: 9337 - RNA, 19 nt, artificial
  Oligomer
ugagccugcugacuaaacu

SEQ ID NO: 9338 - RNA, 19 nt, artificial
  Oligomer
ggucuuucgagugguuugu

SEQ ID NO: 9339 - RNA, 19 nt, artificial
  Oligomer
cgaagguguccaagacaac

SEQ ID NO: 9340 - RNA, 19 nt, artificial
  Oligomer
uggagaaacacaaauucug

SEQ ID NO: 9341 - RNA, 19 nt, artificial
  Oligomer
caggcugguaugcagucau

SEQ ID NO: 9342 - RNA, 19 nt, artificial
  Oligomer
ucauguucaucugcuccag

SEQ ID NO: 9343 - RNA, 19 nt, artificial
  Oligomer
cuccucauguucaucugcu

SEQ ID NO: 9344 - RNA, 19 nt, artificial
  Oligomer
ucacacugugaacuuugua

SEQ ID NO: 9345 - RNA, 19 nt, artificial
  Oligomer
gcgcuuuugcuauggccuu

SEQ ID NO: 9346 - RNA, 19 nt, artificial
  Oligomer
uccaguuccaccagcuuau

SEQ ID NO: 9347 - RNA, 19 nt, artificial
  Oligomer
acauccaguuccaccagcu

SEQ ID NO: 9348 - RNA, 19 nt, artificial
  Oligomer
ucaagaaugaagccgcaga

SEQ ID NO: 9349 - RNA, 19 nt, artificial
  Oligomer
ucagauuuuuccaagagaa

SEQ ID NO: 9350 - RNA, 19 nt, artificial
  Oligomer
cuggaauugguggguucuu

SEQ ID NO: 9351 - RNA, 19 nt, artificial
  Oligomer
agcugcauauguacaugac

SEQ ID NO: 9352 - RNA, 19 nt, artificial
  Oligomer
cggucuuucgagugguuug

SEQ ID NO: 9353 - RNA, 19 nt, artificial
  Oligomer
aagguguccaagacaacau

SEQ ID NO: 9354 - RNA, 19 nt, artificial
  Oligomer
ggcuuauccgaggucucaa

SEQ ID NO: 9355 - RNA, 19 nt, artificial
  Oligomer
cucauguucaucugcucca

SEQ ID NO: 9356 - RNA, 19 nt, artificial
  Oligomer
uccucauguucaucugcuc

SEQ ID NO: 9357 - RNA, 19 nt, artificial
  Oligomer
cacacugugaacuuuguac

SEQ ID NO: 9358 - RNA, 19 nt, artificial
  Oligomer
cucacacugugaacuuugu

SEQ ID NO: 9359 - RNA, 19 nt, artificial
  Oligomer
cgccuaugaagcccuuagu

SEQ ID NO: 9360 - RNA, 19 nt, artificial
  Oligomer
ugccucaacuucgacugca

SEQ ID NO: 9361 - RNA, 19 nt, artificial
  Oligomer
ccuucuuugcagagcgauu

SEQ ID NO: 9362 - RNA, 19 nt, artificial
  Oligomer
gcaugugaaagaguccuuc

SEQ ID NO: 9363 - RNA, 19 nt, artificial
  Oligomer
agaagaaagacuccaucac

SEQ ID NO: 9364 - RNA, 19 nt, artificial
  Oligomer
agcuccauaagguggacuu

SEQ ID NO: 9365 - RNA, 19 nt, artificial
  Oligomer
agguguccaagacaacaug

SEQ ID NO: 9366 - RNA, 19 nt, artificial
  Oligomer
guaacaucaagugcuacau

SEQ ID NO: 9367 - RNA, 19 nt, artificial
  Oligomer
acaggcuguaugaguccuu

SEQ ID NO: 9368 - RNA, 19 nt, artificial
  Oligomer
cagugcuccugagcagaaa

SEQ ID NO: 9369 - RNA, 19 nt, artificial
  Oligomer
ccauugcucgcuaugagug

SEQ ID NO: 9370 - RNA, 19 nt, artificial
  Oligomer
gcaucauggaagucaaccu

SEQ ID NO: 9371 - RNA, 19 nt, artificial
  Oligomer
accagcuuaugggcuacgu

SEQ ID NO: 9372 - RNA, 19 nt, artificial
  Oligomer
ccaguuccaccagcuuaug

SEQ ID NO: 9373 - RNA, 19 nt, artificial
  Oligomer
uccuaccacuggaccagaa

SEQ ID NO: 9374 - RNA, 19 nt, artificial
  Oligomer
cuaguugcgcuuuugcuau

SEQ ID NO: 9375 - RNA, 19 nt, artificial
  Oligomer
acgccuaugaagcccuuag

SEQ ID NO: 9376 - RNA, 19 nt, artificial
  Oligomer
cugcaagaauucaaagcag

SEQ ID NO: 9377 - RNA, 19 nt, artificial
  Oligomer
ccugcaagaauucaaagca

SEQ ID NO: 9378 - RNA, 19 nt, artificial
  Oligomer
ggcuucagauuuuuccaag

SEQ ID NO: 9379 - RNA, 19 nt, artificial
  Oligomer
gugagaaguucggcuucag

SEQ ID NO: 9380 - RNA, 19 nt, artificial
  Oligomer
cugagaagaagggcaaggu

SEQ ID NO: 9381 - RNA, 19 nt, artificial
  Oligomer
acaaggagaagaaagacuc

SEQ ID NO: 9382 - RNA, 19 nt, artificial
  Oligomer
gcauauguacaugacaucu

SEQ ID NO: 9383 - RNA, 19 nt, artificial
  Oligomer
cugcauauguacaugacau

SEQ ID NO: 9384 - RNA, 19 nt, artificial
  Oligomer
gcuuccuggagcugcauau

SEQ ID NO: 9385 - RNA, 19 nt, artificial
  Oligomer
cuaaacuggagauggacca

SEQ ID NO: 9386 - RNA, 19 nt, artificial
  Oligomer
ucgaagguguccaagacaa

SEQ ID NO: 9387 - RNA, 19 nt, artificial
  Oligomer
cuggaucgaagguguccaa

SEQ ID NO: 9388 - RNA, 19 nt, artificial
  Oligomer
ccacuuugagguguucuau

SEQ ID NO: 9389 - RNA, 19 nt, artificial
  Oligomer
ggccacuuugagguguucu

SEQ ID NO: 9390 - RNA, 19 nt, artificial
  Oligomer
gcuccauaagguggacuuu

SEQ ID NO: 9391 - RNA, 19 nt, artificial
  Oligomer
agacaacaugaagcuccau

SEQ ID NO: 9392 - RNA, 19 nt, artificial
  Oligomer
guguccaagacaacaugaa

SEQ ID NO: 9393 - RNA, 19 nt, artificial
  Oligomer
cccuuugcuuccauucugc

SEQ ID NO: 9394 - RNA, 19 nt, artificial
  Oligomer
auguucaucugcuccaguu

SEQ ID NO: 9395 - RNA, 19 nt, artificial
  Oligomer
uccaccagcuuaugggcua

SEQ ID NO: 9396 - RNA, 19 nt, artificial
  Oligomer
accagaacauccaguucca

SEQ ID NO: 9397 - RNA, 19 nt, artificial
  Oligomer
uggaccagaacauccaguu

SEQ ID NO: 9398 - RNA, 19 nt, artificial
  Oligomer
uggcucaaguccuaccacu

SEQ ID NO: 9399 - RNA, 19 nt, artificial
  Oligomer
ucauggagaaccugaccau

SEQ ID NO: 9400 - RNA, 19 nt, artificial
  Oligomer
cgauagaaguggcaccauc

SEQ ID NO: 9401 - RNA, 19 nt, artificial
  Oligomer
ccgauagaaguggcaccau

SEQ ID NO: 9402 - RNA, 19 nt, artificial
  Oligomer
caagagaauuucuagccuc

SEQ ID NO: 9403 - RNA, 19 nt, artificial
  Oligomer
gagaaguucggcuucagau

SEQ ID NO: 9404 - RNA, 19 nt, artificial
  Oligomer
gugcaggucuucuucugug

SEQ ID NO: 9405 - RNA, 19 nt, artificial
  Oligomer
uggagcugcauauguacau

SEQ ID NO: 9406 - RNA, 19 nt, artificial
  Oligomer
uccauaagguggacuuuau

SEQ ID NO: 9407 - RNA, 19 nt, artificial
  Oligomer
acuacuuguaucugaacau

SEQ ID NO: 9408 - RNA, 19 nt, artificial
  Oligomer
ccuggugacuacuuguauc

SEQ ID NO: 9409 - RNA, 19 nt, artificial
  Oligomer
ucacuauagaccuggugac

SEQ ID NO: 9410 - RNA, 19 nt, artificial
  Oligomer
cuguggcucacacugugaa

SEQ ID NO: 9411 - RNA, 19 nt, artificial
  Oligomer
agaacauccaguuccacca

SEQ ID NO: 9412 - RNA, 19 nt, artificial
  Oligomer
ucaaguccuaccacuggac

SEQ ID NO: 9413 - RNA, 19 nt, artificial
  Oligomer
cucaaguccuaccacugga

SEQ ID NO: 9414 - RNA, 19 nt, artificial
  Oligomer
agagcgauucuuugcccua

SEQ ID NO: 9415 - RNA, 19 nt, artificial
  Oligomer
guccuucuuugcagagcga

SEQ ID NO: 9416 - RNA, 19 nt, artificial
  Oligomer
aagcagcucugcaugugaa

SEQ ID NO: 9417 - RNA, 19 nt, artificial
  Oligomer
caaagcagcucugcaugug

SEQ ID NO: 9418 - RNA, 19 nt, artificial
  Oligomer
agaauucaaagcagcucug

SEQ ID NO: 9419 - RNA, 19 nt, artificial
  Oligomer
gccugcaagaauucaaagc

SEQ ID NO: 9420 - RNA, 19 nt, artificial
  Oligomer
gaagcccuuaguccuucua

SEQ ID NO: 9421 - RNA, 19 nt, artificial
  Oligomer
gccugcugacuaaacugga

SEQ ID NO: 9422 - RNA, 19 nt, artificial
  Oligomer
ucauguacaggcaccagaa

SEQ ID NO: 9423 - RNA, 19 nt, artificial
  Oligomer
guaucauguacaggcacca

SEQ ID NO: 9424 - RNA, 19 nt, artificial
  Oligomer
cuggugacuacuuguaucu

SEQ ID NO: 9425 - RNA, 19 nt, artificial
  Oligomer
caaggucacucaucuccuc

SEQ ID NO: 9426 - RNA, 19 nt, artificial
  Oligomer
ggcuucugcucaucuuuca

SEQ ID NO: 9427 - RNA, 19 nt, artificial
  Oligomer
uguggcuucugcucaucuu

SEQ ID NO: 9428 - RNA, 19 nt, artificial
  Oligomer
gguguucuauuggacucac

SEQ ID NO: 9429 - RNA, 19 nt, artificial
  Oligomer
cgcuuuugcuauggccuuc

SEQ ID NO: 9430 - RNA, 19 nt, artificial
  Oligomer
ggaccagaacauccaguuc

SEQ ID NO: 9431 - RNA, 19 nt, artificial
  Oligomer
uggagaaccugaccaucag

SEQ ID NO: 9432 - RNA, 19 nt, artificial
  Oligomer
cucugcaugugaaagaguc

SEQ ID NO: 9433 - RNA, 19 nt, artificial
  Oligomer
cagauuuuuccaagagaau

SEQ ID NO: 9434 - RNA, 19 nt, artificial
  Oligomer
uccuggccaacaaggagaa

SEQ ID NO: 9435 - RNA, 19 nt, artificial
  Oligomer
ugguuugugagccugcuga

SEQ ID NO: 9436 - RNA, 19 nt, artificial
  Oligomer
ucgagugguuugugagccu

SEQ ID NO: 9437 - RNA, 19 nt, artificial
  Oligomer
gccuaugaagcccuuaguc

SEQ ID NO: 9438 - RNA, 19 nt, artificial
  Oligomer
ggagucauggagaaccuga

SEQ ID NO: 9439 - RNA, 19 nt, artificial
  Oligomer
ggacaaacucaaauuccuc

SEQ ID NO: 9440 - RNA, 19 nt, artificial
  Oligomer
uggacaaacucaaauuccu

SEQ ID NO: 9441 - RNA, 19 nt, artificial
  Oligomer
gugaaagaguccuucuuug

SEQ ID NO: 9442 - RNA, 19 nt, artificial
  Oligomer
augugaaagaguccuucuu

SEQ ID NO: 9443 - RNA, 19 nt, artificial
  Oligomer
agcucugcaugugaaagag

SEQ ID NO: 9444 - RNA, 19 nt, artificial
  Oligomer
gaaguucggcuucagauuu

SEQ ID NO: 9445 - RNA, 19 nt, artificial
  Oligomer
uccagaaaguggcugcuga

SEQ ID NO: 9446 - RNA, 19 nt, artificial
  Oligomer
ugcauauguacaugacauc

SEQ ID NO: 9447 - RNA, 19 nt, artificial
  Oligomer
gcugcauauguacaugaca

SEQ ID NO: 9448 - RNA, 19 nt, artificial
  Oligomer
ccauaagguggacuuuauc

SEQ ID NO: 9449 - RNA, 19 nt, artificial
  Oligomer
ccaagacaacaugaagcuc

SEQ ID NO: 9450 - RNA, 19 nt, artificial
  Oligomer
ugcuuccauucugcagagu

SEQ ID NO: 9451 - RNA, 19 nt, artificial
  Oligomer
caggcuguaugaguccuuc

SEQ ID NO: 9452 - RNA, 19 nt, artificial
  Oligomer
ucauggaagucaaccuccu

SEQ ID NO: 9453 - RNA, 19 nt, artificial
  Oligomer
cuggaaucuuguuuuuccu

SEQ ID NO: 9454 - RNA, 19 nt, artificial
  Oligomer
ccaacuucuggaaguggcu

SEQ ID NO: 9455 - RNA, 19 nt, artificial
  Oligomer
cacuuugagguguucuauu

SEQ ID NO: 9456 - RNA, 19 nt, artificial
  Oligomer
uggccacuuugagguguuc

SEQ ID NO: 9457 - RNA, 19 nt, artificial
  Oligomer
ugugaaagaguccuucuuu

SEQ ID NO: 9458 - RNA, 19 nt, artificial
  Oligomer
gcagcucugcaugugaaag

SEQ ID NO: 9459 - RNA, 19 nt, artificial
  Oligomer
agaaguucggcuucagauu

SEQ ID NO: 9460 - RNA, 19 nt, artificial
  Oligomer
ugaagcccuuaguccuucu

SEQ ID NO: 9461 - RNA, 19 nt, artificial
  Oligomer
caggucuucuucuguggcu

SEQ ID NO: 9462 - RNA, 19 nt, artificial
  Oligomer
uugaccuccuggccaacaa

SEQ ID NO: 9463 - RNA, 19 nt, artificial
  Oligomer
cuccauaagguggacuuua

SEQ ID NO: 9464 - RNA, 19 nt, artificial
  Oligomer
caggaucuuugccucugag

SEQ ID NO: 9465 - RNA, 19 nt, artificial
  Oligomer
ggcugguaugcagucaugu

SEQ ID NO: 9466 - RNA, 19 nt, artificial
  Oligomer
ugagcagaaagacacuauc

SEQ ID NO: 9467 - RNA, 19 nt, artificial
  Oligomer
gugcuccugagcagaaaga

SEQ ID NO: 9468 - RNA, 19 nt, artificial
  Oligomer
ugacuacuuguaucugaac

SEQ ID NO: 9469 - RNA, 19 nt, artificial
  Oligomer
gacaaacucaaauuccucu

SEQ ID NO: 9470 - RNA, 19 nt, artificial
  Oligomer
agcagcucugcaugugaaa

SEQ ID NO: 9471 - RNA, 19 nt, artificial
  Oligomer
gcuucagauuuuuccaaga

SEQ ID NO: 9472 - RNA, 19 nt, artificial
  Oligomer
guacaugacaucugcacug

SEQ ID NO: 9473 - RNA, 19 nt, artificial
  Oligomer
ggaucuuugccucugagca

SEQ ID NO: 9474 - RNA, 19 nt, artificial
  Oligomer
gugacaaugagaaagaguc

SEQ ID NO: 9475 - RNA, 19 nt, artificial
  Oligomer
cugucgaggagugugacaa

SEQ ID NO: 9476 - RNA, 19 nt, artificial
  Oligomer
ccuggaaucuuguuuuucc

SEQ ID NO: 9477 - RNA, 19 nt, artificial
  Oligomer
ucguguggcuucugcucau

SEQ ID NO: 9478 - RNA, 19 nt, artificial
  Oligomer
uccucuuccagguguauga

SEQ ID NO: 9479 - RNA, 19 nt, artificial
  Oligomer
aggugcaggucuucuucug

SEQ ID NO: 9480 - RNA, 19 nt, artificial
  Oligomer
ugacaucugcacugggcaa

SEQ ID NO: 9481 - RNA, 19 nt, artificial
  Oligomer
gaagcuccauaagguggac

SEQ ID NO: 9482 - RNA, 19 nt, artificial
  Oligomer
ugaagcuccauaaggugga

SEQ ID NO: 9483 - RNA, 19 nt, artificial
  Oligomer
uggucucacugacuucaag

SEQ ID NO: 9484 - RNA, 19 nt, artificial
  Oligomer
guggcuucugcucaucuuu

SEQ ID NO: 9485 - RNA, 19 nt, artificial
  Oligomer
gucucacugacuucaagaa

SEQ ID NO: 9486 - RNA, 19 nt, artificial
  Oligomer
uucuuggucucacugacuu

SEQ ID NO: 9487 - RNA, 19 nt, artificial
  Oligomer
cuucagauuuuuccaagag

SEQ ID NO: 9488 - RNA, 19 nt, artificial
  Oligomer
gccaacaaggagaagaaag

SEQ ID NO: 9489 - RNA, 19 nt, artificial
  Oligomer
ggcaccagaaaagaaagca

SEQ ID NO: 9490 - RNA, 19 nt, artificial
  Oligomer
cucacugacuucaagaaug

SEQ ID NO: 9491 - RNA, 19 nt, artificial
  Oligomer
agaaugacaugaaggccau

SEQ ID NO: 9492 - RNA, 19 nt, artificial
  Oligomer
cacugacuucaagaaugaa

SEQ ID NO: 9493 - RNA, 19 nt, artificial
  Oligomer
uucagauuuuuccaagaga

SEQ ID NO: 9494 - RNA, 19 nt, artificial
  Oligomer
gguucuuggucucacugac

SEQ ID NO: 9495 - RNA, 19 nt, artificial
  Oligomer
gaaugacaugaaggccauu

SEQ ID NO: 9496 - RNA, 19 nt, artificial
  Oligomer
ucaaauuccucuuccaggu

SEQ ID NO: 9497 - RNA, 19 nt, artificial
  Oligomer
cugcugagaagaagggcaa

SEQ ID NO: 9498 - RNA, 19 nt, artificial
  Oligomer
agcagaaagacacuaucug

SEQ ID NO: 9499 - RNA, 19 nt, artificial
  Oligomer
cuaucggagucaaauaggg

SEQ ID NO: 9500 - RNA, 19 nt, artificial
  Oligomer
uucuaucggagucaaauag

SEQ ID NO: 9501 - RNA, 19 nt, artificial
  Oligomer
uguuucuccaaaaguaucu

SEQ ID NO: 9502 - RNA, 19 nt, artificial
  Oligomer
uucuccaaaaguaucucag

SEQ ID NO: 9503 - RNA, 19 nt, artificial
  Oligomer
ucuauagugaaaaaaaggg

SEQ ID NO: 9504 - RNA, 19 nt, artificial
  Oligomer
aaaacaagauuccaggcac

SEQ ID NO: 9505 - RNA, 19 nt, artificial
  Oligomer
agccuggaguacaaaguuc

SEQ ID NO: 9506 - RNA, 19 nt, artificial
  Oligomer
guuucuccaaaaguaucuc

SEQ ID NO: 9507 - RNA, 19 nt, artificial
  Oligomer
uugaaggacucauacagcc

SEQ ID NO: 9508 - RNA, 19 nt, artificial
  Oligomer
aaaaguaucucagagcccu

SEQ ID NO: 9509 - RNA, 19 nt, artificial
  Oligomer
uccaggaaaaacaagauuc

SEQ ID NO: 9510 - RNA, 19 nt, artificial
  Oligomer
aaacaagauuccaggcacc

SEQ ID NO: 9511 - RNA, 19 nt, artificial
  Oligomer
aguacaaaguucacagugu

SEQ ID NO: 9512 - RNA, 19 nt, artificial
  Oligomer
aucuccaguuuagucagca

SEQ ID NO: 9513 - RNA, 19 nt, artificial
  Oligomer
ucuaucggagucaaauagg

SEQ ID NO: 9514 - RNA, 19 nt, artificial
  Oligomer
ugcaauggucuuaaacugc

SEQ ID NO: 9515 - RNA, 19 nt, artificial
  Oligomer
caucuccaguuuagucagc

SEQ ID NO: 9516 - RNA, 19 nt, artificial
  Oligomer
caaguaugcuuucuuuucu

SEQ ID NO: 9517 - RNA, 19 nt, artificial
  Oligomer
uuguguuucuccaaaagua

SEQ ID NO: 9518 - RNA, 19 nt, artificial
  Oligomer
aggcuagaaauucucuugg

SEQ ID NO: 9519 - RNA, 19 nt, artificial
  Oligomer
augauacucugcagaaugg

SEQ ID NO: 9520 - RNA, 19 nt, artificial
  Oligomer
caaaaguaucucagagccc

SEQ ID NO: 9521 - RNA, 19 nt, artificial
  Oligomer
ucauacagccuguuugucc

SEQ ID NO: 9522 - RNA, 19 nt, artificial
  Oligomer
auuugaguuuguccauggg

SEQ ID NO: 9523 - RNA, 19 nt, artificial
  Oligomer
aaggacucuuucacaugca

SEQ ID NO: 9524 - RNA, 19 nt, artificial
  Oligomer
caauggucuuaaacugcug

SEQ ID NO: 9525 - RNA, 19 nt, artificial
  Oligomer
aauuccagauacaacauga

SEQ ID NO: 9526 - RNA, 19 nt, artificial
  Oligomer
uuucuuuucuggugccugu

SEQ ID NO: 9527 - RNA, 19 nt, artificial
  Oligomer
ccaaaaguaucucagagcc

SEQ ID NO: 9528 - RNA, 19 nt, artificial
  Oligomer
aguaucucagagcccuugg

SEQ ID NO: 9529 - RNA, 19 nt, artificial
  Oligomer
uugaauucuugcaggcuga

SEQ ID NO: 9530 - RNA, 19 nt, artificial
  Oligomer
uugauccagauaaagucca

SEQ ID NO: 9531 - RNA, 19 nt, artificial
  Oligomer
augaggagaugagugaccu

SEQ ID NO: 9532 - RNA, 19 nt, artificial
  Oligomer
acuuccaugaugcacacgg

SEQ ID NO: 9533 - RNA, 19 nt, artificial
  Oligomer
uuugaauucuugcaggcug

SEQ ID NO: 9534 - RNA, 19 nt, artificial
  Oligomer
gaacuucucacaauggccc

SEQ ID NO: 9535 - RNA, 19 nt, artificial
  Oligomer
cuuucuggaacaccuugcu

SEQ ID NO: 9536 - RNA, 19 nt, artificial
  Oligomer
ucuccaguuuagucagcag

SEQ ID NO: 9537 - RNA, 19 nt, artificial
  Oligomer
cuccaguuuagucagcagg

SEQ ID NO: 9538 - RNA, 19 nt, artificial
  Oligomer
guugauccagauaaagucc

SEQ ID NO: 9539 - RNA, 19 nt, artificial
  Oligomer
auccagauaaaguccaccu

SEQ ID NO: 9540 - RNA, 19 nt, artificial
  Oligomer
auuccagauacaacaugac

SEQ ID NO: 9541 - RNA, 19 nt, artificial
  Oligomer
cuccaaaaguaucucagag

SEQ ID NO: 9542 - RNA, 19 nt, artificial
  Oligomer
uuggacgaccuuugacucu

SEQ ID NO: 9543 - RNA, 19 nt, artificial
  Oligomer
aaaaacaagauuccaggca

SEQ ID NO: 9544 - RNA, 19 nt, artificial
  Oligomer
auguucugguccaguggua

SEQ ID NO: 9545 - RNA, 19 nt, artificial
  Oligomer
aagaggaauuugaguuugu

SEQ ID NO: 9546 - RNA, 19 nt, artificial
  Oligomer
uucaugucauucuugccca

SEQ ID NO: 9547 - RNA, 19 nt, artificial
  Oligomer
ccagauacaacaugacugc

SEQ ID NO: 9548 - RNA, 19 nt, artificial
  Oligomer
uugacucuuucucauuguc

SEQ ID NO: 9549 - RNA, 19 nt, artificial
  Oligomer
cuugaaggacucauacagc

SEQ ID NO: 9550 - RNA, 19 nt, artificial
  Oligomer
cauacagccuguuugucca

SEQ ID NO: 9551 - RNA, 19 nt, artificial
  Oligomer
gcaauggauugagaccucg

SEQ ID NO: 9552 - RNA, 19 nt, artificial
  Oligomer
gucuauagugaaaaaaagg

SEQ ID NO: 9553 - RNA, 19 nt, artificial
  Oligomer
uugacuuccaugaugcaca

SEQ ID NO: 9554 - RNA, 19 nt, artificial
  Oligomer
uugggcccaugaaagauga

SEQ ID NO: 9555 - RNA, 19 nt, artificial
  Oligomer
augaacaugaggaggagca

SEQ ID NO: 9556 - RNA, 19 nt, artificial
  Oligomer
agcugcuuugaauucuugc

SEQ ID NO: 9557 - RNA, 19 nt, artificial
  Oligomer
aaccacucgaaagaccgcu

SEQ ID NO: 9558 - RNA, 19 nt, artificial
  Oligomer
aguaugcuuucuuuucugg

SEQ ID NO: 9559 - RNA, 19 nt, artificial
  Oligomer
cuuugacucuuucucauug

SEQ ID NO: 9560 - RNA, 19 nt, artificial
  Oligomer
caacaugacugcauaccag

SEQ ID NO: 9561 - RNA, 19 nt, artificial
  Oligomer
uucucauugucacacuccu

SEQ ID NO: 9562 - RNA, 19 nt, artificial
  Oligomer
auacagccuguuuguccac

SEQ ID NO: 9563 - RNA, 19 nt, artificial
  Oligomer
aggagaugagugaccuugg

SEQ ID NO: 9564 - RNA, 19 nt, artificial
  Oligomer
aacaugaggaggagcagca

SEQ ID NO: 9565 - RNA, 19 nt, artificial
  Oligomer
gagcugcuuugaauucuug

SEQ ID NO: 9566 - RNA, 19 nt, artificial
  Oligomer
aacuucucacaauggcccu

SEQ ID NO: 9567 - RNA, 19 nt, artificial
  Oligomer
uucucacaauggcccuuca

SEQ ID NO: 9568 - RNA, 19 nt, artificial
  Oligomer
ugauccagauaaaguccac

SEQ ID NO: 9569 - RNA, 19 nt, artificial
  Oligomer
agcuucauguugucuugga

SEQ ID NO: 9570 - RNA, 19 nt, artificial
  Oligomer
aaguaugcuuucuuuucug

SEQ ID NO: 9571 - RNA, 19 nt, artificial
  Oligomer
augcuuucuuuucuggugc

SEQ ID NO: 9572 - RNA, 19 nt, artificial
  Oligomer
uacucugcagaauggaagc

SEQ ID NO: 9573 - RNA, 19 nt, artificial
  Oligomer
uaaggcccaucgauguagc

SEQ ID NO: 9574 - RNA, 19 nt, artificial
  Oligomer
gacucauacagccuguuug

SEQ ID NO: 9575 - RNA, 19 nt, artificial
  Oligomer
augugcagccagauagugu

SEQ ID NO: 9576 - RNA, 19 nt, artificial
  Oligomer
auagugucuuucugcucag

SEQ ID NO: 9577 - RNA, 19 nt, artificial
  Oligomer
uagugucuuucugcucagg

SEQ ID NO: 9578 - RNA, 19 nt, artificial
  Oligomer
uguucagauacaaguaguc

SEQ ID NO: 9579 - RNA, 19 nt, artificial
  Oligomer
caauggauugagaccucgg

SEQ ID NO: 9580 - RNA, 19 nt, artificial
  Oligomer
auacaaguagucaccaggu

SEQ ID NO: 9581 - RNA, 19 nt, artificial
  Oligomer
acaucgaugucauacaccu

SEQ ID NO: 9582 - RNA, 19 nt, artificial
  Oligomer
uaaacugcugagucaccca

SEQ ID NO: 9583 - RNA, 19 nt, artificial
  Oligomer
aggugaggcuagaaauucu

SEQ ID NO: 9584 - RNA, 19 nt, artificial
  Oligomer
aaaaucugaagccgaacuu

SEQ ID NO: 9585 - RNA, 19 nt, artificial
  Oligomer
ccgaacuucucacaauggc

SEQ ID NO: 9586 - RNA, 19 nt, artificial
  Oligomer
gccuucaugucauucuugc

SEQ ID NO: 9587 - RNA, 19 nt, artificial
  Oligomer
gauccagauaaaguccacc

SEQ ID NO: 9588 - RNA, 19 nt, artificial
  Oligomer
ugccuguacaugauacucu

SEQ ID NO: 9589 - RNA, 19 nt, artificial
  Oligomer
uccagauacaacaugacug

SEQ ID NO: 9590 - RNA, 19 nt, artificial
  Oligomer
auacaacaugacugcauac

SEQ ID NO: 9591 - RNA, 19 nt, artificial
  Oligomer
cucuuucucauugucacac

SEQ ID NO: 9592 - RNA, 19 nt, artificial
  Oligomer
ucgacagccucuuagaacc

SEQ ID NO: 9593 - RNA, 19 nt, artificial
  Oligomer
acagccucuuagaaccacg

SEQ ID NO: 9594 - RNA, 19 nt, artificial
  Oligomer
uacagccuguuuguccacu

SEQ ID NO: 9595 - RNA, 19 nt, artificial
  Oligomer
ugugcagccagauaguguc

SEQ ID NO: 9596 - RNA, 19 nt, artificial
  Oligomer
ugacuuccaugaugcacac

SEQ ID NO: 9597 - RNA, 19 nt, artificial
  Oligomer
ugaguccaauagaacaccu

SEQ ID NO: 9598 - RNA, 19 nt, artificial
  Oligomer
gaguccaauagaacaccuc

SEQ ID NO: 9599 - RNA, 19 nt, artificial
  Oligomer
agaugaacaugaggaggag

SEQ ID NO: 9600 - RNA, 19 nt, artificial
  Oligomer
ucgaugucauacaccugga

SEQ ID NO: 9601 - RNA, 19 nt, artificial
  Oligomer
uggugccacuucuaucgga

SEQ ID NO: 9602 - RNA, 19 nt, artificial
  Oligomer
caaauagggcaaagaaucg

SEQ ID NO: 9603 - RNA, 19 nt, artificial
  Oligomer
aauggucuuaaacugcuga

SEQ ID NO: 9604 - RNA, 19 nt, artificial
  Oligomer
acuagaaggacuaagggcu

SEQ ID NO: 9605 - RNA, 19 nt, artificial
  Oligomer
aaaaaucugaagccgaacu

SEQ ID NO: 9606 - RNA, 19 nt, artificial
  Oligomer
augucauucuugcccagug

SEQ ID NO: 9607 - RNA, 19 nt, artificial
  Oligomer
cuguacaugauacucugca

SEQ ID NO: 9608 - RNA, 19 nt, artificial
  Oligomer
uguacaugauacucugcag

SEQ ID NO: 9609 - RNA, 19 nt, artificial
  Oligomer
auuuguguuucuccaaaag

SEQ ID NO: 9610 - RNA, 19 nt, artificial
  Oligomer
ucuuucucauugucacacu

SEQ ID NO: 9611 - RNA, 19 nt, artificial
  Oligomer
gacagccucuuagaaccac

SEQ ID NO: 9612 - RNA, 19 nt, artificial
  Oligomer
aaugugcagccagauagug

SEQ ID NO: 9613 - RNA, 19 nt, artificial
  Oligomer
gaaaaacaagauuccaggc

SEQ ID NO: 9614 - RNA, 19 nt, artificial
  Oligomer
cagaugaacaugaggagga

SEQ ID NO: 9615 - RNA, 19 nt, artificial
  Oligomer
ugcacacacaucgauguca

SEQ ID NO: 9616 - RNA, 19 nt, artificial
  Oligomer
acacaucgaugucauacac

SEQ ID NO: 9617 - RNA, 19 nt, artificial
  Oligomer
aagaaucgcucugcaaaga

SEQ ID NO: 9618 - RNA, 19 nt, artificial
  Oligomer
caacuagaaggacuaaggg

SEQ ID NO: 9619 - RNA, 19 nt, artificial
  Oligomer
auggucuuaaacugcugag

SEQ ID NO: 9620 - RNA, 19 nt, artificial
  Oligomer
acccaccaauuccagauac

SEQ ID NO: 9621 - RNA, 19 nt, artificial
  Oligomer
uaugcuuucuuuucuggug

SEQ ID NO: 9622 - RNA, 19 nt, artificial
  Oligomer
cauugucacacuccucgac

SEQ ID NO: 9623 - RNA, 19 nt, artificial
  Oligomer
cagccagauagugucuuuc

SEQ ID NO: 9624 - RNA, 19 nt, artificial
  Oligomer
uucuccaggaaaaacaaga

SEQ ID NO: 9625 - RNA, 19 nt, artificial
  Oligomer
augaaagaugagcagaagc

SEQ ID NO: 9626 - RNA, 19 nt, artificial
  Oligomer
aaagcgcaacuagaaggac

SEQ ID NO: 9627 - RNA, 19 nt, artificial
  Oligomer
aagcgcaacuagaaggacu

SEQ ID NO: 9628 - RNA, 19 nt, artificial
  Oligomer
acagaauuuguguuucucc

SEQ ID NO: 9629 - RNA, 19 nt, artificial
  Oligomer
augucauacaccuggaaga

SEQ ID NO: 9630 - RNA, 19 nt, artificial
  Oligomer
uaucggagucaaauagggc

SEQ ID NO: 9631 - RNA, 19 nt, artificial
  Oligomer
cugcaauggucuuaaacug

SEQ ID NO: 9632 - RNA, 19 nt, artificial
  Oligomer
aucggagucaaauagggca

SEQ ID NO: 9633 - RNA, 19 nt, artificial
  Oligomer
uuucuucuccuuguuggcc

SEQ ID NO: 9634 - RNA, 19 nt, artificial
  Oligomer
uagaacaccucaaaguggc

SEQ ID NO: 9635 - RNA, 19 nt, artificial
  Oligomer
aaaagcgcaacuagaagga

SEQ ID NO: 9636 - RNA, 19 nt, artificial
  Oligomer
uucuucuccuuguuggcca

SEQ ID NO: 9637 - RNA, 19 nt, artificial
  Oligomer
uacagaauuuguguuucuc

SEQ ID NO: 9638 - RNA, 19 nt, artificial
  Oligomer
ucauagcgagcaauggugg

SEQ ID NO: 9639 - RNA, 19 nt, artificial
  Oligomer
aaaguucacagugugagcc

SEQ ID NO: 9640 - RNA, 19 nt, artificial
  Oligomer
aauagggcaaagaaucgcu

SEQ ID NO: 9641 - RNA, 19 nt, artificial
  Oligomer
aaguucacagugugagcca

SEQ ID NO: 9642 - RNA, 19 nt, artificial
  Oligomer
gauggagucuuucuucucc

SEQ ID NO: 9643 - RNA, 19 nt, artificial
  Oligomer
aaaccacucgaaagaccgc

SEQ ID NO: 9644 - RNA, 19 nt, artificial
  Oligomer
aaagaccgcuggucucugu

SEQ ID NO: 9645 - RNA, 19 nt, artificial
  Oligomer
ccaggaaaaacaagauucc

SEQ ID NO: 9646 - RNA, 19 nt, artificial
  Oligomer
auugagaccucggauaagc

SEQ ID NO: 9647 - RNA, 19 nt, artificial
  Oligomer
uggaguacaaaguucacag

SEQ ID NO: 9648 - RNA, 19 nt, artificial
  Oligomer
uuggaaaaaucugaagccg

SEQ ID NO: 9649 - RNA, 19 nt, artificial
  Oligomer
ucagugagaccaagaaccc

SEQ ID NO: 9650 - RNA, 19 nt, artificial
  Oligomer
agugagaccaagaacccac

SEQ ID NO: 9651 - RNA, 19 nt, artificial
  Oligomer
aacaccucaaaguggccac

SEQ ID NO: 9652 - RNA, 19 nt, artificial
  Oligomer
guggaacuggauguucugg

SEQ ID NO: 9653 - RNA, 19 nt, artificial
  Oligomer
aagcugcagucgaaguuga

SEQ ID NO: 9654 - RNA, 19 nt, artificial
  Oligomer
caaaagcgcaacuagaagg

SEQ ID NO: 9655 - RNA, 19 nt, artificial
  Oligomer
gucugcggcuucauucuug

SEQ ID NO: 9656 - RNA, 19 nt, artificial
  Oligomer
auggagucuuucuucuccu

SEQ ID NO: 9657 - RNA, 19 nt, artificial
  Oligomer
aguuuagucagcaggcuca

SEQ ID NO: 9658 - RNA, 19 nt, artificial
  Oligomer
acaaaccacucgaaagacc

SEQ ID NO: 9659 - RNA, 19 nt, artificial
  Oligomer
guugucuuggacaccuucg

SEQ ID NO: 9660 - RNA, 19 nt, artificial
  Oligomer
cagaauuuguguuucucca

SEQ ID NO: 9661 - RNA, 19 nt, artificial
  Oligomer
augacugcauaccagccug

SEQ ID NO: 9662 - RNA, 19 nt, artificial
  Oligomer
cuggagcagaugaacauga

SEQ ID NO: 9663 - RNA, 19 nt, artificial
  Oligomer
agcagaugaacaugaggag

SEQ ID NO: 9664 - RNA, 19 nt, artificial
  Oligomer
uacaaaguucacaguguga

SEQ ID NO: 9665 - RNA, 19 nt, artificial
  Oligomer
aaggccauagcaaaagcgc

SEQ ID NO: 9666 - RNA, 19 nt, artificial
  Oligomer
auaagcugguggaacugga

SEQ ID NO: 9667 - RNA, 19 nt, artificial
  Oligomer
agcugguggaacuggaugu

SEQ ID NO: 9668 - RNA, 19 nt, artificial
  Oligomer
ucugcggcuucauucuuga

SEQ ID NO: 9669 - RNA, 19 nt, artificial
  Oligomer
uucucuuggaaaaaucuga

SEQ ID NO: 9670 - RNA, 19 nt, artificial
  Oligomer
aagaacccaccaauuccag

SEQ ID NO: 9671 - RNA, 19 nt, artificial
  Oligomer
gucauguacauaugcagcu

SEQ ID NO: 9672 - RNA, 19 nt, artificial
  Oligomer
caaaccacucgaaagaccg

SEQ ID NO: 9673 - RNA, 19 nt, artificial
  Oligomer
auguugucuuggacaccuu

SEQ ID NO: 9674 - RNA, 19 nt, artificial
  Oligomer
uugagaccucggauaagcc

SEQ ID NO: 9675 - RNA, 19 nt, artificial
  Oligomer
uggagcagaugaacaugag

SEQ ID NO: 9676 - RNA, 19 nt, artificial
  Oligomer
gagcagaugaacaugagga

SEQ ID NO: 9677 - RNA, 19 nt, artificial
  Oligomer
guacaaaguucacagugug

SEQ ID NO: 9678 - RNA, 19 nt, artificial
  Oligomer
acaaaguucacagugugag

SEQ ID NO: 9679 - RNA, 19 nt, artificial
  Oligomer
acuaagggcuucauaggcg

SEQ ID NO: 9680 - RNA, 19 nt, artificial
  Oligomer
ugcagucgaaguugaggca

SEQ ID NO: 9681 - RNA, 19 nt, artificial
  Oligomer
aaucgcucugcaaagaagg

SEQ ID NO: 9682 - RNA, 19 nt, artificial
  Oligomer
gaaggacucuuucacaugc

SEQ ID NO: 9683 - RNA, 19 nt, artificial
  Oligomer
gugauggagucuuucuucu

SEQ ID NO: 9684 - RNA, 19 nt, artificial
  Oligomer
aaguccaccuuauggagcu

SEQ ID NO: 9685 - RNA, 19 nt, artificial
  Oligomer
cauguugucuuggacaccu

SEQ ID NO: 9686 - RNA, 19 nt, artificial
  Oligomer
auguagcacuugauguuac

SEQ ID NO: 9687 - RNA, 19 nt, artificial
  Oligomer
aaggacucauacagccugu

SEQ ID NO: 9688 - RNA, 19 nt, artificial
  Oligomer
uuucugcucaggagcacug

SEQ ID NO: 9689 - RNA, 19 nt, artificial
  Oligomer
cacucauagcgagcaaugg

SEQ ID NO: 9690 - RNA, 19 nt, artificial
  Oligomer
agguugacuuccaugaugc

SEQ ID NO: 9691 - RNA, 19 nt, artificial
  Oligomer
acguagcccauaagcuggu

SEQ ID NO: 9692 - RNA, 19 nt, artificial
  Oligomer
cauaagcugguggaacugg

SEQ ID NO: 9693 - RNA, 19 nt, artificial
  Oligomer
uucugguccagugguagga

SEQ ID NO: 9694 - RNA, 19 nt, artificial
  Oligomer
auagcaaaagcgcaacuag

SEQ ID NO: 9695 - RNA, 19 nt, artificial
  Oligomer
cuaagggcuucauaggcgu

SEQ ID NO: 9696 - RNA, 19 nt, artificial
  Oligomer
cugcuuugaauucuugcag

SEQ ID NO: 9697 - RNA, 19 nt, artificial
  Oligomer
ugcuuugaauucuugcagg

SEQ ID NO: 9698 - RNA, 19 nt, artificial
  Oligomer
cuuggaaaaaucugaagcc

SEQ ID NO: 9699 - RNA, 19 nt, artificial
  Oligomer
cugaagccgaacuucucac

SEQ ID NO: 9700 - RNA, 19 nt, artificial
  Oligomer
accuugcccuucuucucag

SEQ ID NO: 9701 - RNA, 19 nt, artificial
  Oligomer
gagucuuucuucuccuugu

SEQ ID NO: 9702 - RNA, 19 nt, artificial
  Oligomer
agaugucauguacauaugc

SEQ ID NO: 9703 - RNA, 19 nt, artificial
  Oligomer
augucauguacauaugcag

SEQ ID NO: 9704 - RNA, 19 nt, artificial
  Oligomer
auaugcagcuccaggaagc

SEQ ID NO: 9705 - RNA, 19 nt, artificial
  Oligomer
ugguccaucuccaguuuag

SEQ ID NO: 9706 - RNA, 19 nt, artificial
  Oligomer
uugucuuggacaccuucga

SEQ ID NO: 9707 - RNA, 19 nt, artificial
  Oligomer
uuggacaccuucgauccag

SEQ ID NO: 9708 - RNA, 19 nt, artificial
  Oligomer
auagaacaccucaaagugg

SEQ ID NO: 9709 - RNA, 19 nt, artificial
  Oligomer
agaacaccucaaaguggcc

SEQ ID NO: 9710 - RNA, 19 nt, artificial
  Oligomer
aaaguccaccuuauggagc

SEQ ID NO: 9711 - RNA, 19 nt, artificial
  Oligomer
auggagcuucauguugucu

SEQ ID NO: 9712 - RNA, 19 nt, artificial
  Oligomer
uucauguugucuuggacac

SEQ ID NO: 9713 - RNA, 19 nt, artificial
  Oligomer
gcagaauggaagcaaaggg

SEQ ID NO: 9714 - RNA, 19 nt, artificial
  Oligomer
aacuggagcagaugaacau

SEQ ID NO: 9715 - RNA, 19 nt, artificial
  Oligomer
uagcccauaagcuggugga

SEQ ID NO: 9716 - RNA, 19 nt, artificial
  Oligomer
uggaacuggauguucuggu

SEQ ID NO: 9717 - RNA, 19 nt, artificial
  Oligomer
aacuggauguucuggucca

SEQ ID NO: 9718 - RNA, 19 nt, artificial
  Oligomer
agugguaggacuugagcca

SEQ ID NO: 9719 - RNA, 19 nt, artificial
  Oligomer
auggucagguucuccauga

SEQ ID NO: 9720 - RNA, 19 nt, artificial
  Oligomer
gauggugccacuucuaucg

SEQ ID NO: 9721 - RNA, 19 nt, artificial
  Oligomer
auggugccacuucuaucgg

SEQ ID NO: 9722 - RNA, 19 nt, artificial
  Oligomer
gaggcuagaaauucucuug

SEQ ID NO: 9723 - RNA, 19 nt, artificial
  Oligomer
aucugaagccgaacuucuc

SEQ ID NO: 9724 - RNA, 19 nt, artificial
  Oligomer
cacagaagaagaccugcac

SEQ ID NO: 9725 - RNA, 19 nt, artificial
  Oligomer
auguacauaugcagcucca

SEQ ID NO: 9726 - RNA, 19 nt, artificial
  Oligomer
auaaaguccaccuuaugga

SEQ ID NO: 9727 - RNA, 19 nt, artificial
  Oligomer
auguucagauacaaguagu

SEQ ID NO: 9728 - RNA, 19 nt, artificial
  Oligomer
gauacaaguagucaccagg

SEQ ID NO: 9729 - RNA, 19 nt, artificial
  Oligomer
gucaccaggucuauaguga

SEQ ID NO: 9730 - RNA, 19 nt, artificial
  Oligomer
uucacagugugagccacag

SEQ ID NO: 9731 - RNA, 19 nt, artificial
  Oligomer
ugguggaacuggauguucu

SEQ ID NO: 9732 - RNA, 19 nt, artificial
  Oligomer
guccagugguaggacuuga

SEQ ID NO: 9733 - RNA, 19 nt, artificial
  Oligomer
uccagugguaggacuugag

SEQ ID NO: 9734 - RNA, 19 nt, artificial
  Oligomer
uagggcaaagaaucgcucu

SEQ ID NO: 9735 - RNA, 19 nt, artificial
  Oligomer
ucgcucugcaaagaaggac

SEQ ID NO: 9736 - RNA, 19 nt, artificial
  Oligomer
uucacaugcagagcugcuu

SEQ ID NO: 9737 - RNA, 19 nt, artificial
  Oligomer
cacaugcagagcugcuuug

SEQ ID NO: 9738 - RNA, 19 nt, artificial
  Oligomer
cagagcugcuuugaauucu

SEQ ID NO: 9739 - RNA, 19 nt, artificial
  Oligomer
gcuuugaauucuugcaggc

SEQ ID NO: 9740 - RNA, 19 nt, artificial
  Oligomer
uagaaggacuaagggcuuc

SEQ ID NO: 9741 - RNA, 19 nt, artificial
  Oligomer
uccaguuuagucagcaggc

SEQ ID NO: 9742 - RNA, 19 nt, artificial
  Oligomer
uucuggugccuguacauga

SEQ ID NO: 9743 - RNA, 19 nt, artificial
  Oligomer
uggugccuguacaugauac

SEQ ID NO: 9744 - RNA, 19 nt, artificial
  Oligomer
agauacaaguagucaccag

SEQ ID NO: 9745 - RNA, 19 nt, artificial
  Oligomer
gaggagaugagugaccuug

SEQ ID NO: 9746 - RNA, 19 nt, artificial
  Oligomer
ugaaagaugagcagaagcc

SEQ ID NO: 9747 - RNA, 19 nt, artificial
  Oligomer
aagaugagcagaagccaca

SEQ ID NO: 9748 - RNA, 19 nt, artificial
  Oligomer
gugaguccaauagaacacc

SEQ ID NO: 9749 - RNA, 19 nt, artificial
  Oligomer
gaaggccauagcaaaagcg

SEQ ID NO: 9750 - RNA, 19 nt, artificial
  Oligomer
gaacuggauguucuggucc

SEQ ID NO: 9751 - RNA, 19 nt, artificial
  Oligomer
cugauggucagguucucca

SEQ ID NO: 9752 - RNA, 19 nt, artificial
  Oligomer
gacucuuucacaugcagag

SEQ ID NO: 9753 - RNA, 19 nt, artificial
  Oligomer
auucucuuggaaaaaucug

SEQ ID NO: 9754 - RNA, 19 nt, artificial
  Oligomer
uucuccuuguuggccagga

SEQ ID NO: 9755 - RNA, 19 nt, artificial
  Oligomer
ucagcaggcucacaaacca

SEQ ID NO: 9756 - RNA, 19 nt, artificial
  Oligomer
aggcucacaaaccacucga

SEQ ID NO: 9757 - RNA, 19 nt, artificial
  Oligomer
gacuaagggcuucauaggc

SEQ ID NO: 9758 - RNA, 19 nt, artificial
  Oligomer
ucagguucuccaugacucc

SEQ ID NO: 9759 - RNA, 19 nt, artificial
  Oligomer
gaggaauuugaguuugucc

SEQ ID NO: 9760 - RNA, 19 nt, artificial
  Oligomer
aggaauuugaguuugucca

SEQ ID NO: 9761 - RNA, 19 nt, artificial
  Oligomer
caaagaaggacucuuucac

SEQ ID NO: 9762 - RNA, 19 nt, artificial
  Oligomer
aagaaggacucuuucacau

SEQ ID NO: 9763 - RNA, 19 nt, artificial
  Oligomer
cucuuucacaugcagagcu

SEQ ID NO: 9764 - RNA, 19 nt, artificial
  Oligomer
aaaucugaagccgaacuuc

SEQ ID NO: 9765 - RNA, 19 nt, artificial
  Oligomer
ucagcagccacuuucugga

SEQ ID NO: 9766 - RNA, 19 nt, artificial
  Oligomer
gaugucauguacauaugca

SEQ ID NO: 9767 - RNA, 19 nt, artificial
  Oligomer
ugucauguacauaugcagc

SEQ ID NO: 9768 - RNA, 19 nt, artificial
  Oligomer
gauaaaguccaccuuaugg

SEQ ID NO: 9769 - RNA, 19 nt, artificial
  Oligomer
gagcuucauguugucuugg

SEQ ID NO: 9770 - RNA, 19 nt, artificial
  Oligomer
acucugcagaauggaagca

SEQ ID NO: 9771 - RNA, 19 nt, artificial
  Oligomer
gaaggacucauacagccug

SEQ ID NO: 9772 - RNA, 19 nt, artificial
  Oligomer
aggagguugacuuccauga

SEQ ID NO: 9773 - RNA, 19 nt, artificial
  Oligomer
aggaaaaacaagauuccag

SEQ ID NO: 9774 - RNA, 19 nt, artificial
  Oligomer
agccacuuccagaaguugg

SEQ ID NO: 9775 - RNA, 19 nt, artificial
  Oligomer
aauagaacaccucaaagug

SEQ ID NO: 9776 - RNA, 19 nt, artificial
  Oligomer
gaacaccucaaaguggcca

SEQ ID NO: 9777 - RNA, 19 nt, artificial
  Oligomer
aaagaaggacucuuucaca

SEQ ID NO: 9778 - RNA, 19 nt, artificial
  Oligomer
cuuucacaugcagagcugc

SEQ ID NO: 9779 - RNA, 19 nt, artificial
  Oligomer
aaucugaagccgaacuucu

SEQ ID NO: 9780 - RNA, 19 nt, artificial
  Oligomer
agaaggacuaagggcuuca

SEQ ID NO: 9781 - RNA, 19 nt, artificial
  Oligomer
agccacagaagaagaccug

SEQ ID NO: 9782 - RNA, 19 nt, artificial
  Oligomer
uuguuggccaggaggucaa

SEQ ID NO: 9783 - RNA, 19 nt, artificial
  Oligomer
uaaaguccaccuuauggag

SEQ ID NO: 9784 - RNA, 19 nt, artificial
  Oligomer
cucagaggcaaagauccug

SEQ ID NO: 9785 - RNA, 19 nt, artificial
  Oligomer
acaugacugcauaccagcc

SEQ ID NO: 9786 - RNA, 19 nt, artificial
  Oligomer
gauagugucuuucugcuca

SEQ ID NO: 9787 - RNA, 19 nt, artificial
  Oligomer
ucuuucugcucaggagcac

SEQ ID NO: 9788 - RNA, 19 nt, artificial
  Oligomer
guucagauacaaguaguca

SEQ ID NO: 9789 - RNA, 19 nt, artificial
  Oligomer
agaggaauuugaguuuguc

SEQ ID NO: 9790 - RNA, 19 nt, artificial
  Oligomer
uuucacaugcagagcugcu

SEQ ID NO: 9791 - RNA, 19 nt, artificial
  Oligomer
ucuuggaaaaaucugaagc

SEQ ID NO: 9792 - RNA, 19 nt, artificial
  Oligomer
cagugcagaugucauguac

SEQ ID NO: 9793 - RNA, 19 nt, artificial
  Oligomer
ugcucagaggcaaagaucc

SEQ ID NO: 9794 - RNA, 19 nt, artificial
  Oligomer
gacucuuucucauugucac

SEQ ID NO: 9795 - RNA, 19 nt, artificial
  Oligomer
uugucacacuccucgacag

SEQ ID NO: 9796 - RNA, 19 nt, artificial
  Oligomer
ggaaaaacaagauuccagg

SEQ ID NO: 9797 - RNA, 19 nt, artificial
  Oligomer
augagcagaagccacacga

SEQ ID NO: 9798 - RNA, 19 nt, artificial
  Oligomer
ucauacaccuggaagagga

SEQ ID NO: 9799 - RNA, 19 nt, artificial
  Oligomer
cagaagaagaccugcaccu

SEQ ID NO: 9800 - RNA, 19 nt, artificial
  Oligomer
uugcccagugcagauguca

SEQ ID NO: 9801 - RNA, 19 nt, artificial
  Oligomer
guccaccuuauggagcuuc

SEQ ID NO: 9802 - RNA, 19 nt, artificial
  Oligomer
uccaccuuauggagcuuca

SEQ ID NO: 9803 - RNA, 19 nt, artificial
  Oligomer
cuugaagucagugagacca

SEQ ID NO: 9804 - RNA, 19 nt, artificial
  Oligomer
aaagaugagcagaagccac

SEQ ID NO: 9805 - RNA, 19 nt, artificial
  Oligomer
uucuugaagucagugagac

SEQ ID NO: 9806 - RNA, 19 nt, artificial
  Oligomer
aagucagugagaccaagaa

SEQ ID NO: 9807 - RNA, 19 nt, artificial
  Oligomer
cucuuggaaaaaucugaag

SEQ ID NO: 9808 - RNA, 19 nt, artificial
  Oligomer
cuuucuucuccuuguuggc

SEQ ID NO: 9809 - RNA, 19 nt, artificial
  Oligomer
ugcuuucuuuucuggugcc

SEQ ID NO: 9810 - RNA, 19 nt, artificial
  Oligomer
cauucuugaagucagugag

SEQ ID NO: 9811 - RNA, 19 nt, artificial
  Oligomer
auggccuucaugucauucu

SEQ ID NO: 9812 - RNA, 19 nt, artificial
  Oligomer
uucauucuugaagucagug

SEQ ID NO: 9813 - RNA, 19 nt, artificial
  Oligomer
ucucuuggaaaaaucugaa

SEQ ID NO: 9814 - RNA, 19 nt, artificial
  Oligomer
gucagugagaccaagaacc

SEQ ID NO: 9815 - RNA, 19 nt, artificial
  Oligomer
aauggccuucaugucauuc

SEQ ID NO: 9816 - RNA, 19 nt, artificial
  Oligomer
accuggaagaggaauuuga

SEQ ID NO: 9817 - RNA, 19 nt, artificial
  Oligomer
uugcccuucuucucagcag

SEQ ID NO: 9818 - RNA, 19 nt, artificial
  Oligomer
cagauagugucuuucugcu

SEQ ID NO: 9819 - RNA, 21 nt, artificial
  Oligomer
ugagauacuuuuggagaaaca

SEQ ID NO: 9820 - RNA, 21 nt, artificial
  Oligomer
ccaagggcucugagauacuuu

SEQ ID NO: 9821 - RNA, 21 nt, artificial
  Oligomer
gagauacuuuuggagaaacac

SEQ ID NO: 9822 - RNA, 21 nt, artificial
  Oligomer
ucugagauacuuuuggagaaa

SEQ ID NO: 9823 - RNA, 21 nt, artificial
  Oligomer
gggcucugagauacuuuugga

SEQ ID NO: 9824 - RNA, 21 nt, artificial
  Oligomer
cugagauacuuuuggagaaac

SEQ ID NO: 9825 - RNA, 21 nt, artificial
  Oligomer
uggugccuggaaucuuguuuu

SEQ ID NO: 9826 - RNA, 21 nt, artificial
  Oligomer
ccugcugacuaaacuggagau

SEQ ID NO: 9827 - RNA, 21 nt, artificial
  Oligomer
caaauucuguaacaucaagug

SEQ ID NO: 9828 - RNA, 21 nt, artificial
  Oligomer
gcagucauguuguaucuggaa

SEQ ID NO: 9829 - RNA, 21 nt, artificial
  Oligomer
cugacuaaacuggagauggac

SEQ ID NO: 9830 - RNA, 21 nt, artificial
  Oligomer
gcugacuaaacuggagaugga

SEQ ID NO: 9831 - RNA, 21 nt, artificial
  Oligomer
ggcucugagauacuuuuggag

SEQ ID NO: 9832 - RNA, 21 nt, artificial
  Oligomer
gagcaagguguuccagaaagu

SEQ ID NO: 9833 - RNA, 21 nt, artificial
  Oligomer
cucugagauacuuuuggagaa

SEQ ID NO: 9834 - RNA, 21 nt, artificial
  Oligomer
caagggcucugagauacuuuu

SEQ ID NO: 9835 - RNA, 21 nt, artificial
  Oligomer
ugguaugcagucauguuguau

SEQ ID NO: 9836 - RNA, 21 nt, artificial
  Oligomer
agacacuaucuggcugcacau

SEQ ID NO: 9837 - RNA, 21 nt, artificial
  Oligomer
cgugugcaucauggaagucaa

SEQ ID NO: 9838 - RNA, 21 nt, artificial
  Oligomer
gcaagaauucaaagcagcucu

SEQ ID NO: 9839 - RNA, 21 nt, artificial
  Oligomer
cugcugacuaaacuggagaug

SEQ ID NO: 9840 - RNA, 21 nt, artificial
  Oligomer
gguggacuuuaucuggaucaa

SEQ ID NO: 9841 - RNA, 21 nt, artificial
  Oligomer
gcucugagauacuuuuggaga

SEQ ID NO: 9842 - RNA, 21 nt, artificial
  Oligomer
ugagaaagagucaaaggucgu

SEQ ID NO: 9843 - RNA, 21 nt, artificial
  Oligomer
ggagugugacaaugagaaaga

SEQ ID NO: 9844 - RNA, 21 nt, artificial
  Oligomer
ggacaaacaggcuguaugagu

SEQ ID NO: 9845 - RNA, 21 nt, artificial
  Oligomer
guggacaaacaggcuguauga

SEQ ID NO: 9846 - RNA, 21 nt, artificial
  Oligomer
agaccuggugacuacuuguau

SEQ ID NO: 9847 - RNA, 21 nt, artificial
  Oligomer
cuggugccuggaaucuuguuu

SEQ ID NO: 9848 - RNA, 21 nt, artificial
  Oligomer
gaagggccauugugagaaguu

SEQ ID NO: 9849 - RNA, 21 nt, artificial
  Oligomer
agucauguuguaucuggaauu

SEQ ID NO: 9850 - RNA, 21 nt, artificial
  Oligomer
aaagagucaaaggucguccaa

SEQ ID NO: 9851 - RNA, 21 nt, artificial
  Oligomer
gcuggugccuggaaucuuguu

SEQ ID NO: 9852 - RNA, 21 nt, artificial
  Oligomer
cuaccacuggaccagaacauc

SEQ ID NO: 9853 - RNA, 21 nt, artificial
  Oligomer
ccuaccacuggaccagaacau

SEQ ID NO: 9854 - RNA, 21 nt, artificial
  Oligomer
cccauggacaaacucaaauuc

SEQ ID NO: 9855 - RNA, 21 nt, artificial
  Oligomer
gagaucagccugcaagaauuc

SEQ ID NO: 9856 - RNA, 21 nt, artificial
  Oligomer
gcagaguaucauguacaggca

SEQ ID NO: 9857 - RNA, 21 nt, artificial
  Oligomer
cugguaugcagucauguugua

SEQ ID NO: 9858 - RNA, 21 nt, artificial
  Oligomer
caguggacaaacaggcuguau

SEQ ID NO: 9859 - RNA, 21 nt, artificial
  Oligomer
ucaucuuucaugggcccaacu

SEQ ID NO: 9860 - RNA, 21 nt, artificial
  Oligomer
caaacucaaauuccucuucca

SEQ ID NO: 9861 - RNA, 21 nt, artificial
  Oligomer
ucugcaugugaaagaguccuu

SEQ ID NO: 9862 - RNA, 21 nt, artificial
  Oligomer
agcaagguguuccagaaagug

SEQ ID NO: 9863 - RNA, 21 nt, artificial
  Oligomer
guacaggcaccagaaaagaaa

SEQ ID NO: 9864 - RNA, 21 nt, artificial
  Oligomer
ugcuacaucgaugggccuuau

SEQ ID NO: 9865 - RNA, 21 nt, artificial
  Oligomer
ggagaaacacaaauucuguaa

SEQ ID NO: 9866 - RNA, 21 nt, artificial
  Oligomer
gaaagagucaaaggucgucca

SEQ ID NO: 9867 - RNA, 21 nt, artificial
  Oligomer
guaugcagucauguuguaucu

SEQ ID NO: 9868 - RNA, 21 nt, artificial
  Oligomer
gugugcaucauggaagucaac

SEQ ID NO: 9869 - RNA, 21 nt, artificial
  Oligomer
ggugccuggaaucuuguuuuu

SEQ ID NO: 9870 - RNA, 21 nt, artificial
  Oligomer
guggacuuuaucuggaucaac

SEQ ID NO: 9871 - RNA, 21 nt, artificial
  Oligomer
uaagguggacuuuaucuggau

SEQ ID NO: 9872 - RNA, 21 nt, artificial
  Oligomer
ccagaaaagaaagcauacuug

SEQ ID NO: 9873 - RNA, 21 nt, artificial
  Oligomer
gucauguuguaucuggaauug

SEQ ID NO: 9874 - RNA, 21 nt, artificial
  Oligomer
ugcagucauguuguaucugga

SEQ ID NO: 9875 - RNA, 21 nt, artificial
  Oligomer
gguguaugacaucgaugugug

SEQ ID NO: 9876 - RNA, 21 nt, artificial
  Oligomer
cagguguaugacaucgaugug

SEQ ID NO: 9877 - RNA, 21 nt, artificial
  Oligomer
ccagguguaugacaucgaugu

SEQ ID NO: 9878 - RNA, 21 nt, artificial
  Oligomer
ucagccugcaagaauucaaag

SEQ ID NO: 9879 - RNA, 21 nt, artificial
  Oligomer
gugggugacucagcaguuuaa

SEQ ID NO: 9880 - RNA, 21 nt, artificial
  Oligomer
gcacugggcaagaaugacaug

SEQ ID NO: 9881 - RNA, 21 nt, artificial
  Oligomer
cagcggucuuucgagugguuu

SEQ ID NO: 9882 - RNA, 21 nt, artificial
  Oligomer
agguggacuuuaucuggauca

SEQ ID NO: 9883 - RNA, 21 nt, artificial
  Oligomer
accagaaaagaaagcauacuu

SEQ ID NO: 9884 - RNA, 21 nt, artificial
  Oligomer
gcuuccauucugcagaguauc

SEQ ID NO: 9885 - RNA, 21 nt, artificial
  Oligomer
gcuacaucgaugggccuuaug

SEQ ID NO: 9886 - RNA, 21 nt, artificial
  Oligomer
cagucauguuguaucuggaau

SEQ ID NO: 9887 - RNA, 21 nt, artificial
  Oligomer
gacaaugagaaagagucaaag

SEQ ID NO: 9888 - RNA, 21 nt, artificial
  Oligomer
cuccaaggucacucaucuccu

SEQ ID NO: 9889 - RNA, 21 nt, artificial
  Oligomer
gaaucuuguuuuuccuggaga

SEQ ID NO: 9890 - RNA, 21 nt, artificial
  Oligomer
cucaucuuucaugggcccaac

SEQ ID NO: 9891 - RNA, 21 nt, artificial
  Oligomer
gcuccuccucauguucaucug

SEQ ID NO: 9892 - RNA, 21 nt, artificial
  Oligomer
gcugcuccuccucauguucau

SEQ ID NO: 9893 - RNA, 21 nt, artificial
  Oligomer
aagcccuuaguccuucuaguu

SEQ ID NO: 9894 - RNA, 21 nt, artificial
  Oligomer
cugggcaagaaugacaugaag

SEQ ID NO: 9895 - RNA, 21 nt, artificial
  Oligomer
gcaccagaaaagaaagcauac

SEQ ID NO: 9896 - RNA, 21 nt, artificial
  Oligomer
cauucugcagaguaucaugua

SEQ ID NO: 9897 - RNA, 21 nt, artificial
  Oligomer
ccauucugcagaguaucaugu

SEQ ID NO: 9898 - RNA, 21 nt, artificial
  Oligomer
uccauucugcagaguaucaug

SEQ ID NO: 9899 - RNA, 21 nt, artificial
  Oligomer
ugguucuaagaggcugucgag

SEQ ID NO: 9900 - RNA, 21 nt, artificial
  Oligomer
ccuaugaagcccuuaguccuu

SEQ ID NO: 9901 - RNA, 21 nt, artificial
  Oligomer
gaaagacacuaucuggcugca

SEQ ID NO: 9902 - RNA, 21 nt, artificial
  Oligomer
guguaugacaucgaugugugu

SEQ ID NO: 9903 - RNA, 21 nt, artificial
  Oligomer
uccagguguaugacaucgaug

SEQ ID NO: 9904 - RNA, 21 nt, artificial
  Oligomer
uuccagguguaugacaucgau

SEQ ID NO: 9905 - RNA, 21 nt, artificial
  Oligomer
gcgauucuuugcccuauuuga

SEQ ID NO: 9906 - RNA, 21 nt, artificial
  Oligomer
cccuuaguccuucuaguugcg

SEQ ID NO: 9907 - RNA, 21 nt, artificial
  Oligomer
ggagaucagccugcaagaauu

SEQ ID NO: 9908 - RNA, 21 nt, artificial
  Oligomer
ugaagggccauugugagaagu

SEQ ID NO: 9909 - RNA, 21 nt, artificial
  Oligomer
cugaagggccauugugagaag

SEQ ID NO: 9910 - RNA, 21 nt, artificial
  Oligomer
acugggcaagaaugacaugaa

SEQ ID NO: 9911 - RNA, 21 nt, artificial
  Oligomer
gagugugacaaugagaaagag

SEQ ID NO: 9912 - RNA, 21 nt, artificial
  Oligomer
gacacuaucuggcugcacauu

SEQ ID NO: 9913 - RNA, 21 nt, artificial
  Oligomer
cugcuccuccucauguucauc

SEQ ID NO: 9914 - RNA, 21 nt, artificial
  Oligomer
uuaguccuucuaguugcgcuu

SEQ ID NO: 9915 - RNA, 21 nt, artificial
  Oligomer
ccauugugagaaguucggcuu

SEQ ID NO: 9916 - RNA, 21 nt, artificial
  Oligomer
gugcuacaucgaugggccuua

SEQ ID NO: 9917 - RNA, 21 nt, artificial
  Oligomer
ccuuuuuuucacuauagaccu

SEQ ID NO: 9918 - RNA, 21 nt, artificial
  Oligomer
gugccuggaaucuuguuuuuc

SEQ ID NO: 9919 - RNA, 21 nt, artificial
  Oligomer
cucuuccagguguaugacauc

SEQ ID NO: 9920 - RNA, 21 nt, artificial
  Oligomer
gcaaggugcaggucuucuucu

SEQ ID NO: 9921 - RNA, 21 nt, artificial
  Oligomer
aaucuuguuuuuccuggagaa

SEQ ID NO: 9922 - RNA, 21 nt, artificial
  Oligomer
gcuuuugcuauggccuucguc

SEQ ID NO: 9923 - RNA, 21 nt, artificial
  Oligomer
gggagaucagccugcaagaau

SEQ ID NO: 9924 - RNA, 21 nt, artificial
  Oligomer
acgacgccuaugaagcccuua

SEQ ID NO: 9925 - RNA, 21 nt, artificial
  Oligomer
ccaacaaggagaagaaagacu

SEQ ID NO: 9926 - RNA, 21 nt, artificial
  Oligomer
ggucacucaucuccucaucaa

SEQ ID NO: 9927 - RNA, 21 nt, artificial
  Oligomer
gcccuauuugacuccgauaga

SEQ ID NO: 9928 - RNA, 21 nt, artificial
  Oligomer
ggugggugacucagcaguuua

SEQ ID NO: 9929 - RNA, 21 nt, artificial
  Oligomer
caaggagaagaaagacuccau

SEQ ID NO: 9930 - RNA, 21 nt, artificial
  Oligomer
gaagguguccaagacaacaug

SEQ ID NO: 9931 - RNA, 21 nt, artificial
  Oligomer
cccuauuugacuccgauagaa

SEQ ID NO: 9932 - RNA, 21 nt, artificial
  Oligomer
gaggagugugacaaugagaaa

SEQ ID NO: 9933 - RNA, 21 nt, artificial
  Oligomer
cgaggagugugacaaugagaa

SEQ ID NO: 9934 - RNA, 21 nt, artificial
  Oligomer
gucacucaucuccucaucaag

SEQ ID NO: 9935 - RNA, 21 nt, artificial
  Oligomer
aggucacucaucuccucauca

SEQ ID NO: 9936 - RNA, 21 nt, artificial
  Oligomer
ggcuuauccgaggucucaauc

SEQ ID NO: 9937 - RNA, 21 nt, artificial
  Oligomer
uugcccuauuugacuccgaua

SEQ ID NO: 9938 - RNA, 21 nt, artificial
  Oligomer
uggagaaacacaaauucugua

SEQ ID NO: 9939 - RNA, 21 nt, artificial
  Oligomer
ggccacuuugagguguucuau

SEQ ID NO: 9940 - RNA, 21 nt, artificial
  Oligomer
gcucacacugugaacuuugua

SEQ ID NO: 9941 - RNA, 21 nt, artificial
  Oligomer
uggcucacacugugaacuuug

SEQ ID NO: 9942 - RNA, 21 nt, artificial
  Oligomer
ccuauuugacuccgauagaag

SEQ ID NO: 9943 - RNA, 21 nt, artificial
  Oligomer
agaaaguggcugcugagaaga

SEQ ID NO: 9944 - RNA, 21 nt, artificial
  Oligomer
cgaagguguccaagacaacau

SEQ ID NO: 9945 - RNA, 21 nt, artificial
  Oligomer
ccuccucauguucaucugcuc

SEQ ID NO: 9946 - RNA, 21 nt, artificial
  Oligomer
gugaacuuuguacuccaggcu

SEQ ID NO: 9947 - RNA, 21 nt, artificial
  Oligomer
cacugugaacuuuguacucca

SEQ ID NO: 9948 - RNA, 21 nt, artificial
  Oligomer
cucaacuucgacugcagcuuc

SEQ ID NO: 9949 - RNA, 21 nt, artificial
  Oligomer
guccuucuaguugcgcuuuug

SEQ ID NO: 9950 - RNA, 21 nt, artificial
  Oligomer
agagcgauucuuugcccuauu

SEQ ID NO: 9951 - RNA, 21 nt, artificial
  Oligomer
gaaaguggcugcugagaagaa

SEQ ID NO: 9952 - RNA, 21 nt, artificial
  Oligomer
cuggccaacaaggagaagaaa

SEQ ID NO: 9953 - RNA, 21 nt, artificial
  Oligomer
ggagcugcauauguacaugac

SEQ ID NO: 9954 - RNA, 21 nt, artificial
  Oligomer
guaucuggaauugguggguuc

SEQ ID NO: 9955 - RNA, 21 nt, artificial
  Oligomer
ccaagacaacaugaagcucca

SEQ ID NO: 9956 - RNA, 21 nt, artificial
  Oligomer
ucguccaagggcucugagaua

SEQ ID NO: 9957 - RNA, 21 nt, artificial
  Oligomer
ucgaggagugugacaaugaga

SEQ ID NO: 9958 - RNA, 21 nt, artificial
  Oligomer
ccaccauugcucgcuaugagu

SEQ ID NO: 9959 - RNA, 21 nt, artificial
  Oligomer
uggugacuacuuguaucugaa

SEQ ID NO: 9960 - RNA, 21 nt, artificial
  Oligomer
cggcuuauccgaggucucaau

SEQ ID NO: 9961 - RNA, 21 nt, artificial
  Oligomer
ccucauguucaucugcuccag

SEQ ID NO: 9962 - RNA, 21 nt, artificial
  Oligomer
ugaacuuuguacuccaggcuc

SEQ ID NO: 9963 - RNA, 21 nt, artificial
  Oligomer
ccagaacauccaguuccacca

SEQ ID NO: 9964 - RNA, 21 nt, artificial
  Oligomer
caacuucgacugcagcuucau

SEQ ID NO: 9965 - RNA, 21 nt, artificial
  Oligomer
cggucuuucgagugguuugug

SEQ ID NO: 9966 - RNA, 21 nt, artificial
  Oligomer
ggacuuuaucuggaucaacag

SEQ ID NO: 9967 - RNA, 21 nt, artificial
  Oligomer
caagacaacaugaagcuccau

SEQ ID NO: 9968 - RNA, 21 nt, artificial
  Oligomer
ucacacugugaacuuuguacu

SEQ ID NO: 9969 - RNA, 21 nt, artificial
  Oligomer
guggcucacacugugaacuuu

SEQ ID NO: 9970 - RNA, 21 nt, artificial
  Oligomer
uguggcucacacugugaacuu

SEQ ID NO: 9971 - RNA, 21 nt, artificial
  Oligomer
gcagagcgauucuuugcccua

SEQ ID NO: 9972 - RNA, 21 nt, artificial
  Oligomer
agaccauugcaggagaagaug

SEQ ID NO: 9973 - RNA, 21 nt, artificial
  Oligomer
gcugcauauguacaugacauc

SEQ ID NO: 9974 - RNA, 21 nt, artificial
  Oligomer
gcggucuuucgagugguuugu

SEQ ID NO: 9975 - RNA, 21 nt, artificial
  Oligomer
gagaaacacaaauucuguaac

SEQ ID NO: 9976 - RNA, 21 nt, artificial
  Oligomer
acaggcuguaugaguccuuca

SEQ ID NO: 9977 - RNA, 21 nt, artificial
  Oligomer
uuauccgaggucucaauccau

SEQ ID NO: 9978 - RNA, 21 nt, artificial
  Oligomer
gccacuuugagguguucuauu

SEQ ID NO: 9979 - RNA, 21 nt, artificial
  Oligomer
cacacugugaacuuuguacuc

SEQ ID NO: 9980 - RNA, 21 nt, artificial
  Oligomer
acauccaguuccaccagcuua

SEQ ID NO: 9981 - RNA, 21 nt, artificial
  Oligomer
ggaccagaacauccaguucca

SEQ ID NO: 9982 - RNA, 21 nt, artificial
  Oligomer
ggacaaacucaaauuccucuu

SEQ ID NO: 9983 - RNA, 21 nt, artificial
  Oligomer
ccuucuuugcagagcgauucu

SEQ ID NO: 9984 - RNA, 21 nt, artificial
  Oligomer
ccaagagaauuucuagccuca

SEQ ID NO: 9985 - RNA, 21 nt, artificial
  Oligomer
ggaauugguggguucuugguc

SEQ ID NO: 9986 - RNA, 21 nt, artificial
  Oligomer
gccugcugacuaaacuggaga

SEQ ID NO: 9987 - RNA, 21 nt, artificial
  Oligomer
caacagagaccagcggucuuu

SEQ ID NO: 9988 - RNA, 21 nt, artificial
  Oligomer
cuguaacaucaagugcuacau

SEQ ID NO: 9989 - RNA, 21 nt, artificial
  Oligomer
guccaagggcucugagauacu

SEQ ID NO: 9990 - RNA, 21 nt, artificial
  Oligomer
ugacaaugagaaagagucaaa

SEQ ID NO: 9991 - RNA, 21 nt, artificial
  Oligomer
ugacuacuuguaucugaacau

SEQ ID NO: 9992 - RNA, 21 nt, artificial
  Oligomer
cuauagaccuggugacuacuu

SEQ ID NO: 9993 - RNA, 21 nt, artificial
  Oligomer
gaguggccacuuugagguguu

SEQ ID NO: 9994 - RNA, 21 nt, artificial
  Oligomer
ggcucacacugugaacuuugu

SEQ ID NO: 9995 - RNA, 21 nt, artificial
  Oligomer
aacauccaguuccaccagcuu

SEQ ID NO: 9996 - RNA, 21 nt, artificial
  Oligomer
gaccagaacauccaguuccac

SEQ ID NO: 9997 - RNA, 21 nt, artificial
  Oligomer
ccucaacuucgacugcagcuu

SEQ ID NO: 9998 - RNA, 21 nt, artificial
  Oligomer
gaauucaaagcagcucugcau

SEQ ID NO: 9999 - RNA, 21 nt, artificial
  Oligomer
caagagaauuucuagccucac

SEQ ID NO: 10000 - RNA, 21 nt, artificial
  Oligomer
ugagaaguucggcuucagauu

SEQ ID NO: 10001 - RNA, 21 nt, artificial
  Oligomer
ugcugagaagaagggcaaggu

SEQ ID NO: 10002 - RNA, 21 nt, artificial
  Oligomer
ggagaagaaagacuccaucac

SEQ ID NO: 10003 - RNA, 21 nt, artificial
  Oligomer
ccuggccaacaaggagaagaa

SEQ ID NO: 10004 - RNA, 21 nt, artificial
  Oligomer
gugagccugcugacuaaacug

SEQ ID NO: 10005 - RNA, 21 nt, artificial
  Oligomer
gcuccauaagguggacuuuau

SEQ ID NO: 10006 - RNA, 21 nt, artificial
  Oligomer
gacaacaugaagcuccauaag

SEQ ID NO: 10007 - RNA, 21 nt, artificial
  Oligomer
agacaacaugaagcuccauaa

SEQ ID NO: 10008 - RNA, 21 nt, artificial
  Oligomer
gguguccaagacaacaugaag

SEQ ID NO: 10009 - RNA, 21 nt, artificial
  Oligomer
ccaguggacaaacaggcugua

SEQ ID NO: 10010 - RNA, 21 nt, artificial
  Oligomer
ggugacuacuuguaucugaac

SEQ ID NO: 10011 - RNA, 21 nt, artificial
  Oligomer
ccaaggucacucaucuccuca

SEQ ID NO: 10012 - RNA, 21 nt, artificial
  Oligomer
gacgccuaugaagcccuuagu

SEQ ID NO: 10013 - RNA, 21 nt, artificial
  Oligomer
gcagcucugcaugugaaagag

SEQ ID NO: 10014 - RNA, 21 nt, artificial
  Oligomer
gccugcaagaauucaaagcag

SEQ ID NO: 10015 - RNA, 21 nt, artificial
  Oligomer
cagcaguuuaagaccauugca

SEQ ID NO: 10016 - RNA, 21 nt, artificial
  Oligomer
ucuuggucucacugacuucaa

SEQ ID NO: 10017 - RNA, 21 nt, artificial
  Oligomer
uggagcaagguguuccagaaa

SEQ ID NO: 10018 - RNA, 21 nt, artificial
  Oligomer
aggagaagaaagacuccauca

SEQ ID NO: 10019 - RNA, 21 nt, artificial
  Oligomer
agguguccaagacaacaugaa

SEQ ID NO: 10020 - RNA, 21 nt, artificial
  Oligomer
ggaucgaagguguccaagaca

SEQ ID NO: 10021 - RNA, 21 nt, artificial
  Oligomer
aggcugguaugcagucauguu

SEQ ID NO: 10022 - RNA, 21 nt, artificial
  Oligomer
ccuggugacuacuuguaucug

SEQ ID NO: 10023 - RNA, 21 nt, artificial
  Oligomer
ggaaucuuguuuuuccuggag

SEQ ID NO: 10024 - RNA, 21 nt, artificial
  Oligomer
acgccuaugaagcccuuaguc

SEQ ID NO: 10025 - RNA, 21 nt, artificial
  Oligomer
ccgauagaaguggcaccauca

SEQ ID NO: 10026 - RNA, 21 nt, artificial
  Oligomer
gcaugugaaagaguccuucuu

SEQ ID NO: 10027 - RNA, 21 nt, artificial
  Oligomer
aaagcagcucugcaugugaaa

SEQ ID NO: 10028 - RNA, 21 nt, artificial
  Oligomer
gacucagcaguuuaagaccau

SEQ ID NO: 10029 - RNA, 21 nt, artificial
  Oligomer
gaaguucggcuucagauuuuu

SEQ ID NO: 10030 - RNA, 21 nt, artificial
  Oligomer
augaagcccuuaguccuucua

SEQ ID NO: 10031 - RNA, 21 nt, artificial
  Oligomer
gguuugugagccugcugacua

SEQ ID NO: 10032 - RNA, 21 nt, artificial
  Oligomer
ucauguacaggcaccagaaaa

SEQ ID NO: 10033 - RNA, 21 nt, artificial
  Oligomer
aggcuguaugaguccuucaag

SEQ ID NO: 10034 - RNA, 21 nt, artificial
  Oligomer
guguggcuucugcucaucuuu

SEQ ID NO: 10035 - RNA, 21 nt, artificial
  Oligomer
acacuguggcucacacuguga

SEQ ID NO: 10036 - RNA, 21 nt, artificial
  Oligomer
gaacauccaguuccaccagcu

SEQ ID NO: 10037 - RNA, 21 nt, artificial
  Oligomer
ugcaugugaaagaguccuucu

SEQ ID NO: 10038 - RNA, 21 nt, artificial
  Oligomer
cugcaagaauucaaagcagcu

SEQ ID NO: 10039 - RNA, 21 nt, artificial
  Oligomer
gagaaguucggcuucagauuu

SEQ ID NO: 10040 - RNA, 21 nt, artificial
  Oligomer
gugagaaguucggcuucagau

SEQ ID NO: 10041 - RNA, 21 nt, artificial
  Oligomer
ggagcaagguguuccagaaag

SEQ ID NO: 10042 - RNA, 21 nt, artificial
  Oligomer
uggagcugcauauguacauga

SEQ ID NO: 10043 - RNA, 21 nt, artificial
  Oligomer
cuggagcugcauauguacaug

SEQ ID NO: 10044 - RNA, 21 nt, artificial
  Oligomer
uccuggaucgaagguguccaa

SEQ ID NO: 10045 - RNA, 21 nt, artificial
  Oligomer
ggaucuuugccucugagcaug

SEQ ID NO: 10046 - RNA, 21 nt, artificial
  Oligomer
ugaguccuucaaggcaucaga

SEQ ID NO: 10047 - RNA, 21 nt, artificial
  Oligomer
guaugaguccuucaaggcauc

SEQ ID NO: 10048 - RNA, 21 nt, artificial
  Oligomer
ccuggaaucuuguuuuuccug

SEQ ID NO: 10049 - RNA, 21 nt, artificial
  Oligomer
gccuggaaucuuguuuuuccu

SEQ ID NO: 10050 - RNA, 21 nt, artificial
  Oligomer
ugcuggugccuggaaucuugu

SEQ ID NO: 10051 - RNA, 21 nt, artificial
  Oligomer
ucaugggcccaacuucuggaa

SEQ ID NO: 10052 - RNA, 21 nt, artificial
  Oligomer
cuauuggacucaccuguccua

SEQ ID NO: 10053 - RNA, 21 nt, artificial
  Oligomer
ccacuuugagguguucuauug

SEQ ID NO: 10054 - RNA, 21 nt, artificial
  Oligomer
cgcuuuugcuauggccuucgu

SEQ ID NO: 10055 - RNA, 21 nt, artificial
  Oligomer
cagaacauccaguuccaccag

SEQ ID NO: 10056 - RNA, 21 nt, artificial
  Oligomer
cuccgauagaaguggcaccau

SEQ ID NO: 10057 - RNA, 21 nt, artificial
  Oligomer
guccuucuuugcagagcgauu

SEQ ID NO: 10058 - RNA, 21 nt, artificial
  Oligomer
gaguccuucuuugcagagcga

SEQ ID NO: 10059 - RNA, 21 nt, artificial
  Oligomer
gaaagaguccuucuuugcaga

SEQ ID NO: 10060 - RNA, 21 nt, artificial
  Oligomer
cagcucugcaugugaaagagu

SEQ ID NO: 10061 - RNA, 21 nt, artificial
  Oligomer
agccugcaagaauucaaagca

SEQ ID NO: 10062 - RNA, 21 nt, artificial
  Oligomer
gggugacucagcaguuuaaga

SEQ ID NO: 10063 - RNA, 21 nt, artificial
  Oligomer
agagaauuucuagccucaccu

SEQ ID NO: 10064 - RNA, 21 nt, artificial
  Oligomer
ggccaacaaggagaagaaaga

SEQ ID NO: 10065 - RNA, 21 nt, artificial
  Oligomer
ugacaucugcacugggcaaga

SEQ ID NO: 10066 - RNA, 21 nt, artificial
  Oligomer
gagcugcauauguacaugaca

SEQ ID NO: 10067 - RNA, 21 nt, artificial
  Oligomer
gaguaucauguacaggcacca

SEQ ID NO: 10068 - RNA, 21 nt, artificial
  Oligomer
gcugucgaggagugugacaau

SEQ ID NO: 10069 - RNA, 21 nt, artificial
  Oligomer
gcuguaugaguccuucaaggc

SEQ ID NO: 10070 - RNA, 21 nt, artificial
  Oligomer
caggcuguaugaguccuucaa

SEQ ID NO: 10071 - RNA, 21 nt, artificial
  Oligomer
aaacaggcuguaugaguccuu

SEQ ID NO: 10072 - RNA, 21 nt, artificial
  Oligomer
gcugguaugcagucauguugu

SEQ ID NO: 10073 - RNA, 21 nt, artificial
  Oligomer
uccugagcagaaagacacuau

SEQ ID NO: 10074 - RNA, 21 nt, artificial
  Oligomer
accuggugacuacuuguaucu

SEQ ID NO: 10075 - RNA, 21 nt, artificial
  Oligomer
caaggucacucaucuccucau

SEQ ID NO: 10076 - RNA, 21 nt, artificial
  Oligomer
agccgugugcaucauggaagu

SEQ ID NO: 10077 - RNA, 21 nt, artificial
  Oligomer
uggcuucugcucaucuuucau

SEQ ID NO: 10078 - RNA, 21 nt, artificial
  Oligomer
cauguucaucugcuccaguuc

SEQ ID NO: 10079 - RNA, 21 nt, artificial
  Oligomer
acuggaccagaacauccaguu

SEQ ID NO: 10080 - RNA, 21 nt, artificial
  Oligomer
aaauuccucuuccagguguau

SEQ ID NO: 10081 - RNA, 21 nt, artificial
  Oligomer
gagcgauucuuugcccuauuu

SEQ ID NO: 10082 - RNA, 21 nt, artificial
  Oligomer
aguccuucuuugcagagcgau

SEQ ID NO: 10083 - RNA, 21 nt, artificial
  Oligomer
caugugaaagaguccuucuuu

SEQ ID NO: 10084 - RNA, 21 nt, artificial
  Oligomer
caaagcagcucugcaugugaa

SEQ ID NO: 10085 - RNA, 21 nt, artificial
  Oligomer
caagaauucaaagcagcucug

SEQ ID NO: 10086 - RNA, 21 nt, artificial
  Oligomer
ugggugacucagcaguuuaag

SEQ ID NO: 10087 - RNA, 21 nt, artificial
  Oligomer
uccaagagaauuucuagccuc

SEQ ID NO: 10088 - RNA, 21 nt, artificial
  Oligomer
cggcuucagauuuuuccaaga

SEQ ID NO: 10089 - RNA, 21 nt, artificial
  Oligomer
ucggcuucagauuuuuccaag

SEQ ID NO: 10090 - RNA, 21 nt, artificial
  Oligomer
ugacuggagcaagguguucca

SEQ ID NO: 10091 - RNA, 21 nt, artificial
  Oligomer
gcauauguacaugacaucugc

SEQ ID NO: 10092 - RNA, 21 nt, artificial
  Oligomer
agcugcauauguacaugacau

SEQ ID NO: 10093 - RNA, 21 nt, artificial
  Oligomer
gucuuucgagugguuugugag

SEQ ID NO: 10094 - RNA, 21 nt, artificial
  Oligomer
cuccauaagguggacuuuauc

SEQ ID NO: 10095 - RNA, 21 nt, artificial
  Oligomer
agcuccauaagguggacuuua

SEQ ID NO: 10096 - RNA, 21 nt, artificial
  Oligomer
ugcuuccauucugcagaguau

SEQ ID NO: 10097 - RNA, 21 nt, artificial
  Oligomer
uugcuuccauucugcagagua

SEQ ID NO: 10098 - RNA, 21 nt, artificial
  Oligomer
cccuuugcuuccauucugcag

SEQ ID NO: 10099 - RNA, 21 nt, artificial
  Oligomer
ggcugguaugcagucauguug

SEQ ID NO: 10100 - RNA, 21 nt, artificial
  Oligomer
ucacuauagaccuggugacua

SEQ ID NO: 10101 - RNA, 21 nt, artificial
  Oligomer
ugcaucauggaagucaaccuc

SEQ ID NO: 10102 - RNA, 21 nt, artificial
  Oligomer
uggaaucuuguuuuuccugga

SEQ ID NO: 10103 - RNA, 21 nt, artificial
  Oligomer
cguguggcuucugcucaucuu

SEQ ID NO: 10104 - RNA, 21 nt, artificial
  Oligomer
gguguucuauuggacucaccu

SEQ ID NO: 10105 - RNA, 21 nt, artificial
  Oligomer
cuggaccagaacauccaguuc

SEQ ID NO: 10106 - RNA, 21 nt, artificial
  Oligomer
agucauggagaaccugaccau

SEQ ID NO: 10107 - RNA, 21 nt, artificial
  Oligomer
ggcuucagauuuuuccaagag

SEQ ID NO: 10108 - RNA, 21 nt, artificial
  Oligomer
agaaguucggcuucagauuuu

SEQ ID NO: 10109 - RNA, 21 nt, artificial
  Oligomer
cuggagcaagguguuccagaa

SEQ ID NO: 10110 - RNA, 21 nt, artificial
  Oligomer
ccuggagcugcauauguacau

SEQ ID NO: 10111 - RNA, 21 nt, artificial
  Oligomer
ucaacagagaccagcggucuu

SEQ ID NO: 10112 - RNA, 21 nt, artificial
  Oligomer
ccauaagguggacuuuaucug

SEQ ID NO: 10113 - RNA, 21 nt, artificial
  Oligomer
gaagcuccauaagguggacuu

SEQ ID NO: 10114 - RNA, 21 nt, artificial
  Oligomer
ggcaccagaaaagaaagcaua

SEQ ID NO: 10115 - RNA, 21 nt, artificial
  Oligomer
aggcaccagaaaagaaagcau

SEQ ID NO: 10116 - RNA, 21 nt, artificial
  Oligomer
uaacaucaagugcuacaucga

SEQ ID NO: 10117 - RNA, 21 nt, artificial
  Oligomer
gcaucauggaagucaaccucc

SEQ ID NO: 10118 - RNA, 21 nt, artificial
  Oligomer
ugagguguucuauuggacuca

SEQ ID NO: 10119 - RNA, 21 nt, artificial
  Oligomer
ccauggacaaacucaaauucc

SEQ ID NO: 10120 - RNA, 21 nt, artificial
  Oligomer
cgauucuuugcccuauuugac

SEQ ID NO: 10121 - RNA, 21 nt, artificial
  Oligomer
ucaaagcagcucugcauguga

SEQ ID NO: 10122 - RNA, 21 nt, artificial
  Oligomer
ugaagcccuuaguccuucuag

SEQ ID NO: 10123 - RNA, 21 nt, artificial
  Oligomer
cugcauauguacaugacaucu

SEQ ID NO: 10124 - RNA, 21 nt, artificial
  Oligomer
caacaugaagcuccauaaggu

SEQ ID NO: 10125 - RNA, 21 nt, artificial
  Oligomer
gcuccugagcagaaagacacu

SEQ ID NO: 10126 - RNA, 21 nt, artificial
  Oligomer
gccuaugaagcccuuaguccu

SEQ ID NO: 10127 - RNA, 21 nt, artificial
  Oligomer
ucguguggcuucugcucaucu

SEQ ID NO: 10128 - RNA, 21 nt, artificial
  Oligomer
uggccacuuugagguguucua

SEQ ID NO: 10129 - RNA, 21 nt, artificial
  Oligomer
gcuuaugggcuacgugguagu

SEQ ID NO: 10130 - RNA, 21 nt, artificial
  Oligomer
cagcuuaugggcuacguggua

SEQ ID NO: 10131 - RNA, 21 nt, artificial
  Oligomer
gacaaacucaaauuccucuuc

SEQ ID NO: 10132 - RNA, 21 nt, artificial
  Oligomer
cgauagaaguggcaccaucac

SEQ ID NO: 10133 - RNA, 21 nt, artificial
  Oligomer
agcgauucuuugcccuauuug

SEQ ID NO: 10134 - RNA, 21 nt, artificial
  Oligomer
uucuuugcagagcgauucuuu

SEQ ID NO: 10135 - RNA, 21 nt, artificial
  Oligomer
gagaauuucuagccucaccuc

SEQ ID NO: 10136 - RNA, 21 nt, artificial
  Oligomer
gccaacaaggagaagaaagac

SEQ ID NO: 10137 - RNA, 21 nt, artificial
  Oligomer
ggcaagaaugacaugaaggcc

SEQ ID NO: 10138 - RNA, 21 nt, artificial
  Oligomer
ugcacugggcaagaaugacau

SEQ ID NO: 10139 - RNA, 21 nt, artificial
  Oligomer
acaucugcacugggcaagaau

SEQ ID NO: 10140 - RNA, 21 nt, artificial
  Oligomer
ccugagcagaaagacacuauc

SEQ ID NO: 10141 - RNA, 21 nt, artificial
  Oligomer
caggcugguaugcagucaugu

SEQ ID NO: 10142 - RNA, 21 nt, artificial
  Oligomer
gcucaucuuucaugggcccaa

SEQ ID NO: 10143 - RNA, 21 nt, artificial
  Oligomer
gagguguucuauuggacucac

SEQ ID NO: 10144 - RNA, 21 nt, artificial
  Oligomer
guggccacuuugagguguucu

SEQ ID NO: 10145 - RNA, 21 nt, artificial
  Oligomer
caucugcuccaguuccugcau

SEQ ID NO: 10146 - RNA, 21 nt, artificial
  Oligomer
caaauuccucuuccaggugua

SEQ ID NO: 10147 - RNA, 21 nt, artificial
  Oligomer
gcaguuuaagaccauugcagg

SEQ ID NO: 10148 - RNA, 21 nt, artificial
  Oligomer
ggucucacugacuucaagaau

SEQ ID NO: 10149 - RNA, 21 nt, artificial
  Oligomer
cuucagauuuuuccaagagaa

SEQ ID NO: 10150 - RNA, 21 nt, artificial
  Oligomer
gcuucagauuuuuccaagaga

SEQ ID NO: 10151 - RNA, 21 nt, artificial
  Oligomer
acaugacaucugcacugggca

SEQ ID NO: 10152 - RNA, 21 nt, artificial
  Oligomer
aggaucuuugccucugagcau

SEQ ID NO: 10153 - RNA, 21 nt, artificial
  Oligomer
ggcuucugcucaucuuucaug

SEQ ID NO: 10154 - RNA, 21 nt, artificial
  Oligomer
ccucuuccagguguaugacau

SEQ ID NO: 10155 - RNA, 21 nt, artificial
  Oligomer
aagcuccauaagguggacuuu

SEQ ID NO: 10156 - RNA, 21 nt, artificial
  Oligomer
cagaguaucauguacaggcac

SEQ ID NO: 10157 - RNA, 21 nt, artificial
  Oligomer
gacuacuuguaucugaacauc

SEQ ID NO: 10158 - RNA, 21 nt, artificial
  Oligomer
acucagcaguuuaagaccauu

SEQ ID NO: 10159 - RNA, 21 nt, artificial
  Oligomer
cucacugacuucaagaaugaa

SEQ ID NO: 10160 - RNA, 21 nt, artificial
  Oligomer
uggucucacugacuucaagaa

SEQ ID NO: 10161 - RNA, 21 nt, artificial
  Oligomer
gguucuuggucucacugacuu

SEQ ID NO: 10162 - RNA, 21 nt, artificial
  Oligomer
ccagaaaguggcugcugagaa

SEQ ID NO: 10163 - RNA, 21 nt, artificial
  Oligomer
caacaaggagaagaaagacuc

SEQ ID NO: 10164 - RNA, 21 nt, artificial
  Oligomer
cucagcaguuuaagaccauug

SEQ ID NO: 10165 - RNA, 21 nt, artificial
  Oligomer
ggguucuuggucucacugacu

SEQ ID NO: 10166 - RNA, 21 nt, artificial
  Oligomer
caagaaugacaugaaggccau

SEQ ID NO: 10167 - RNA, 21 nt, artificial
  Oligomer
gcagaaagacacuaucuggcu

SEQ ID NO: 10168 - RNA, 21 nt, artificial
  Oligomer
agcagugcuccugagcagaaa

SEQ ID NO: 10169 - RNA, 21 nt, artificial
  Oligomer
ucauguucaucugcuccaguu

SEQ ID NO: 10170 - RNA, 21 nt, artificial
  Oligomer
caacuucuggaaguggcugcu

SEQ ID NO: 10171 - RNA, 21 nt, artificial
  Oligomer
cucaaauuccucuuccaggug

SEQ ID NO: 10172 - RNA, 21 nt, artificial
  Oligomer
ucucacugacuucaagaauga

SEQ ID NO: 10173 - RNA, 21 nt, artificial
  Oligomer
gacaucugcacugggcaagaa

SEQ ID NO: 10174 - RNA, 21 nt, artificial
  Oligomer
ugguggguucuuggucucacu

SEQ ID NO: 10175 - RNA, 21 nt, artificial
  Oligomer
aagaaugacaugaaggccauu

SEQ ID NO: 10176 - RNA, 21 nt, artificial
  Oligomer
gcaagaaugacaugaaggcca

SEQ ID NO: 10177 - RNA, 21 nt, artificial
  Oligomer
cucauguucaucugcuccagu

SEQ ID NO: 10178 - RNA, 21 nt, artificial
  Oligomer
cugagcagaaagacacuaucu

SEQ ID NO: 10179 - RNA, 21 nt, artificial
  Oligomer
gacuucaagaaugaagccgca

SEQ ID NO: 10180 - RNA, 21 nt, artificial
  Oligomer
uguuucuccaaaaguaucuca

SEQ ID NO: 10181 - RNA, 21 nt, artificial
  Oligomer
aaaguaucucagagcccuugg

SEQ ID NO: 10182 - RNA, 21 nt, artificial
  Oligomer
guguuucuccaaaaguaucuc

SEQ ID NO: 10183 - RNA, 21 nt, artificial
  Oligomer
uuucuccaaaaguaucucaga

SEQ ID NO: 10184 - RNA, 21 nt, artificial
  Oligomer
uccaaaaguaucucagagccc

SEQ ID NO: 10185 - RNA, 21 nt, artificial
  Oligomer
guuucuccaaaaguaucucag

SEQ ID NO: 10186 - RNA, 21 nt, artificial
  Oligomer
aaaacaagauuccaggcacca

SEQ ID NO: 10187 - RNA, 21 nt, artificial
  Oligomer
aucuccaguuuagucagcagg

SEQ ID NO: 10188 - RNA, 21 nt, artificial
  Oligomer
cacuugauguuacagaauuug

SEQ ID NO: 10189 - RNA, 21 nt, artificial
  Oligomer
uuccagauacaacaugacugc

SEQ ID NO: 10190 - RNA, 21 nt, artificial
  Oligomer
guccaucuccaguuuagucag

SEQ ID NO: 10191 - RNA, 21 nt, artificial
  Oligomer
uccaucuccaguuuagucagc

SEQ ID NO: 10192 - RNA, 21 nt, artificial
  Oligomer
cuccaaaaguaucucagagcc

SEQ ID NO: 10193 - RNA, 21 nt, artificial
  Oligomer
acuuucuggaacaccuugcuc

SEQ ID NO: 10194 - RNA, 21 nt, artificial
  Oligomer
uucuccaaaaguaucucagag

SEQ ID NO: 10195 - RNA, 21 nt, artificial
  Oligomer
aaaaguaucucagagcccuug

SEQ ID NO: 10196 - RNA, 21 nt, artificial
  Oligomer
auacaacaugacugcauacca

SEQ ID NO: 10197 - RNA, 21 nt, artificial
  Oligomer
augugcagccagauagugucu

SEQ ID NO: 10198 - RNA, 21 nt, artificial
  Oligomer
uugacuuccaugaugcacacg

SEQ ID NO: 10199 - RNA, 21 nt, artificial
  Oligomer
agagcugcuuugaauucuugc

SEQ ID NO: 10200 - RNA, 21 nt, artificial
  Oligomer
caucuccaguuuagucagcag

SEQ ID NO: 10201 - RNA, 21 nt, artificial
  Oligomer
uugauccagauaaaguccacc

SEQ ID NO: 10202 - RNA, 21 nt, artificial
  Oligomer
ucuccaaaaguaucucagagc

SEQ ID NO: 10203 - RNA, 21 nt, artificial
  Oligomer
acgaccuuugacucuuucuca

SEQ ID NO: 10204 - RNA, 21 nt, artificial
  Oligomer
ucuuucucauugucacacucc

SEQ ID NO: 10205 - RNA, 21 nt, artificial
  Oligomer
acucauacagccuguuugucc

SEQ ID NO: 10206 - RNA, 21 nt, artificial
  Oligomer
ucauacagccuguuuguccac

SEQ ID NO: 10207 - RNA, 21 nt, artificial
  Oligomer
auacaaguagucaccaggucu

SEQ ID NO: 10208 - RNA, 21 nt, artificial
  Oligomer
aaacaagauuccaggcaccag

SEQ ID NO: 10209 - RNA, 21 nt, artificial
  Oligomer
aacuucucacaauggcccuuc

SEQ ID NO: 10210 - RNA, 21 nt, artificial
  Oligomer
aauuccagauacaacaugacu

SEQ ID NO: 10211 - RNA, 21 nt, artificial
  Oligomer
uuggacgaccuuugacucuuu

SEQ ID NO: 10212 - RNA, 21 nt, artificial
  Oligomer
aacaagauuccaggcaccagc

SEQ ID NO: 10213 - RNA, 21 nt, artificial
  Oligomer
gauguucugguccagugguag

SEQ ID NO: 10214 - RNA, 21 nt, artificial
  Oligomer
auguucugguccagugguagg

SEQ ID NO: 10215 - RNA, 21 nt, artificial
  Oligomer
gaauuugaguuuguccauggg

SEQ ID NO: 10216 - RNA, 21 nt, artificial
  Oligomer
gaauucuugcaggcugaucuc

SEQ ID NO: 10217 - RNA, 21 nt, artificial
  Oligomer
ugccuguacaugauacucugc

SEQ ID NO: 10218 - RNA, 21 nt, artificial
  Oligomer
uacaacaugacugcauaccag

SEQ ID NO: 10219 - RNA, 21 nt, artificial
  Oligomer
auacagccuguuuguccacug

SEQ ID NO: 10220 - RNA, 21 nt, artificial
  Oligomer
aguugggcccaugaaagauga

SEQ ID NO: 10221 - RNA, 21 nt, artificial
  Oligomer
uggaagaggaauuugaguuug

SEQ ID NO: 10222 - RNA, 21 nt, artificial
  Oligomer
aaggacucuuucacaugcaga

SEQ ID NO: 10223 - RNA, 21 nt, artificial
  Oligomer
cacuuucuggaacaccuugcu

SEQ ID NO: 10224 - RNA, 21 nt, artificial
  Oligomer
uuucuuuucuggugccuguac

SEQ ID NO: 10225 - RNA, 21 nt, artificial
  Oligomer
auaaggcccaucgauguagca

SEQ ID NO: 10226 - RNA, 21 nt, artificial
  Oligomer
uuacagaauuuguguuucucc

SEQ ID NO: 10227 - RNA, 21 nt, artificial
  Oligomer
uggacgaccuuugacucuuuc

SEQ ID NO: 10228 - RNA, 21 nt, artificial
  Oligomer
agauacaacaugacugcauac

SEQ ID NO: 10229 - RNA, 21 nt, artificial
  Oligomer
guugacuuccaugaugcacac

SEQ ID NO: 10230 - RNA, 21 nt, artificial
  Oligomer
aaaaacaagauuccaggcacc

SEQ ID NO: 10231 - RNA, 21 nt, artificial
  Oligomer
guugauccagauaaaguccac

SEQ ID NO: 10232 - RNA, 21 nt, artificial
  Oligomer
auccagauaaaguccaccuua

SEQ ID NO: 10233 - RNA, 21 nt, artificial
  Oligomer
caaguaugcuuucuuuucugg

SEQ ID NO: 10234 - RNA, 21 nt, artificial
  Oligomer
caauuccagauacaacaugac

SEQ ID NO: 10235 - RNA, 21 nt, artificial
  Oligomer
uccagauacaacaugacugca

SEQ ID NO: 10236 - RNA, 21 nt, artificial
  Oligomer
cacacaucgaugucauacacc

SEQ ID NO: 10237 - RNA, 21 nt, artificial
  Oligomer
cacaucgaugucauacaccug

SEQ ID NO: 10238 - RNA, 21 nt, artificial
  Oligomer
acaucgaugucauacaccugg

SEQ ID NO: 10239 - RNA, 21 nt, artificial
  Oligomer
cuuugaauucuugcaggcuga

SEQ ID NO: 10240 - RNA, 21 nt, artificial
  Oligomer
uuaaacugcugagucacccac

SEQ ID NO: 10241 - RNA, 21 nt, artificial
  Oligomer
caugucauucuugcccagugc

SEQ ID NO: 10242 - RNA, 21 nt, artificial
  Oligomer
aaaccacucgaaagaccgcug

SEQ ID NO: 10243 - RNA, 21 nt, artificial
  Oligomer
ugauccagauaaaguccaccu

SEQ ID NO: 10244 - RNA, 21 nt, artificial
  Oligomer
aaguaugcuuucuuuucuggu

SEQ ID NO: 10245 - RNA, 21 nt, artificial
  Oligomer
gauacucugcagaauggaagc

SEQ ID NO: 10246 - RNA, 21 nt, artificial
  Oligomer
cauaaggcccaucgauguagc

SEQ ID NO: 10247 - RNA, 21 nt, artificial
  Oligomer
auuccagauacaacaugacug

SEQ ID NO: 10248 - RNA, 21 nt, artificial
  Oligomer
cuuugacucuuucucauuguc

SEQ ID NO: 10249 - RNA, 21 nt, artificial
  Oligomer
aggagaugagugaccuuggag

SEQ ID NO: 10250 - RNA, 21 nt, artificial
  Oligomer
ucuccaggaaaaacaagauuc

SEQ ID NO: 10251 - RNA, 21 nt, artificial
  Oligomer
guugggcccaugaaagaugag

SEQ ID NO: 10252 - RNA, 21 nt, artificial
  Oligomer
cagaugaacaugaggaggagc

SEQ ID NO: 10253 - RNA, 21 nt, artificial
  Oligomer
augaacaugaggaggagcagc

SEQ ID NO: 10254 - RNA, 21 nt, artificial
  Oligomer
aacuagaaggacuaagggcuu

SEQ ID NO: 10255 - RNA, 21 nt, artificial
  Oligomer
cuucaugucauucuugcccag

SEQ ID NO: 10256 - RNA, 21 nt, artificial
  Oligomer
guaugcuuucuuuucuggugc

SEQ ID NO: 10257 - RNA, 21 nt, artificial
  Oligomer
uacaugauacucugcagaaug

SEQ ID NO: 10258 - RNA, 21 nt, artificial
  Oligomer
acaugauacucugcagaaugg

SEQ ID NO: 10259 - RNA, 21 nt, artificial
  Oligomer
caugauacucugcagaaugga

SEQ ID NO: 10260 - RNA, 21 nt, artificial
  Oligomer
cucgacagccucuuagaacca

SEQ ID NO: 10261 - RNA, 21 nt, artificial
  Oligomer
aaggacuaagggcuucauagg

SEQ ID NO: 10262 - RNA, 21 nt, artificial
  Oligomer
ugcagccagauagugucuuuc

SEQ ID NO: 10263 - RNA, 21 nt, artificial
  Oligomer
acacacaucgaugucauacac

SEQ ID NO: 10264 - RNA, 21 nt, artificial
  Oligomer
caucgaugucauacaccugga

SEQ ID NO: 10265 - RNA, 21 nt, artificial
  Oligomer
aucgaugucauacaccuggaa

SEQ ID NO: 10266 - RNA, 21 nt, artificial
  Oligomer
ucaaauagggcaaagaaucgc

SEQ ID NO: 10267 - RNA, 21 nt, artificial
  Oligomer
cgcaacuagaaggacuaaggg

SEQ ID NO: 10268 - RNA, 21 nt, artificial
  Oligomer
aauucuugcaggcugaucucc

SEQ ID NO: 10269 - RNA, 21 nt, artificial
  Oligomer
acuucucacaauggcccuuca

SEQ ID NO: 10270 - RNA, 21 nt, artificial
  Oligomer
cuucucacaauggcccuucag

SEQ ID NO: 10271 - RNA, 21 nt, artificial
  Oligomer
uucaugucauucuugcccagu

SEQ ID NO: 10272 - RNA, 21 nt, artificial
  Oligomer
cucuuucucauugucacacuc

SEQ ID NO: 10273 - RNA, 21 nt, artificial
  Oligomer
aaugugcagccagauaguguc

SEQ ID NO: 10274 - RNA, 21 nt, artificial
  Oligomer
gaugaacaugaggaggagcag

SEQ ID NO: 10275 - RNA, 21 nt, artificial
  Oligomer
aagcgcaacuagaaggacuaa

SEQ ID NO: 10276 - RNA, 21 nt, artificial
  Oligomer
aagccgaacuucucacaaugg

SEQ ID NO: 10277 - RNA, 21 nt, artificial
  Oligomer
uaaggcccaucgauguagcac

SEQ ID NO: 10278 - RNA, 21 nt, artificial
  Oligomer
aggucuauagugaaaaaaagg

SEQ ID NO: 10279 - RNA, 21 nt, artificial
  Oligomer
gaaaaacaagauuccaggcac

SEQ ID NO: 10280 - RNA, 21 nt, artificial
  Oligomer
gaugucauacaccuggaagag

SEQ ID NO: 10281 - RNA, 21 nt, artificial
  Oligomer
agaagaagaccugcaccuugc

SEQ ID NO: 10282 - RNA, 21 nt, artificial
  Oligomer
uucuccaggaaaaacaagauu

SEQ ID NO: 10283 - RNA, 21 nt, artificial
  Oligomer
gacgaaggccauagcaaaagc

SEQ ID NO: 10284 - RNA, 21 nt, artificial
  Oligomer
auucuugcaggcugaucuccc

SEQ ID NO: 10285 - RNA, 21 nt, artificial
  Oligomer
uaagggcuucauaggcgucgu

SEQ ID NO: 10286 - RNA, 21 nt, artificial
  Oligomer
agucuuucuucuccuuguugg

SEQ ID NO: 10287 - RNA, 21 nt, artificial
  Oligomer
uugaugaggagaugagugacc

SEQ ID NO: 10288 - RNA, 21 nt, artificial
  Oligomer
ucuaucggagucaaauagggc

SEQ ID NO: 10289 - RNA, 21 nt, artificial
  Oligomer
uaaacugcugagucacccacc

SEQ ID NO: 10290 - RNA, 21 nt, artificial
  Oligomer
auggagucuuucuucuccuug

SEQ ID NO: 10291 - RNA, 21 nt, artificial
  Oligomer
cauguugucuuggacaccuuc

SEQ ID NO: 10292 - RNA, 21 nt, artificial
  Oligomer
uucuaucggagucaaauaggg

SEQ ID NO: 10293 - RNA, 21 nt, artificial
  Oligomer
uuucucauugucacacuccuc

SEQ ID NO: 10294 - RNA, 21 nt, artificial
  Oligomer
uucucauugucacacuccucg

SEQ ID NO: 10295 - RNA, 21 nt, artificial
  Oligomer
cuugaugaggagaugagugac

SEQ ID NO: 10296 - RNA, 21 nt, artificial
  Oligomer
ugaugaggagaugagugaccu

SEQ ID NO: 10297 - RNA, 21 nt, artificial
  Oligomer
gauugagaccucggauaagcc

SEQ ID NO: 10298 - RNA, 21 nt, artificial
  Oligomer
uaucggagucaaauagggcaa

SEQ ID NO: 10299 - RNA, 21 nt, artificial
  Oligomer
uacagaauuuguguuucucca

SEQ ID NO: 10300 - RNA, 21 nt, artificial
  Oligomer
auagaacaccucaaaguggcc

SEQ ID NO: 10301 - RNA, 21 nt, artificial
  Oligomer
uacaaaguucacagugugagc

SEQ ID NO: 10302 - RNA, 21 nt, artificial
  Oligomer
caaaguucacagugugagcca

SEQ ID NO: 10303 - RNA, 21 nt, artificial
  Oligomer
cuucuaucggagucaaauagg

SEQ ID NO: 10304 - RNA, 21 nt, artificial
  Oligomer
ucuucucagcagccacuuucu

SEQ ID NO: 10305 - RNA, 21 nt, artificial
  Oligomer
auguugucuuggacaccuucg

SEQ ID NO: 10306 - RNA, 21 nt, artificial
  Oligomer
gagcagaugaacaugaggagg

SEQ ID NO: 10307 - RNA, 21 nt, artificial
  Oligomer
agccuggaguacaaaguucac

SEQ ID NO: 10308 - RNA, 21 nt, artificial
  Oligomer
uggaguacaaaguucacagug

SEQ ID NO: 10309 - RNA, 21 nt, artificial
  Oligomer
gaagcugcagucgaaguugag

SEQ ID NO: 10310 - RNA, 21 nt, artificial
  Oligomer
caaaagcgcaacuagaaggac

SEQ ID NO: 10311 - RNA, 21 nt, artificial
  Oligomer
aauagggcaaagaaucgcucu

SEQ ID NO: 10312 - RNA, 21 nt, artificial
  Oligomer
uucuucucagcagccacuuuc

SEQ ID NO: 10313 - RNA, 21 nt, artificial
  Oligomer
uuucuucuccuuguuggccag

SEQ ID NO: 10314 - RNA, 21 nt, artificial
  Oligomer
gucauguacauaugcagcucc

SEQ ID NO: 10315 - RNA, 21 nt, artificial
  Oligomer
gaacccaccaauuccagauac

SEQ ID NO: 10316 - RNA, 21 nt, artificial
  Oligomer
uggagcuucauguugucuugg

SEQ ID NO: 10317 - RNA, 21 nt, artificial
  Oligomer
uaucucagagcccuuggacga

SEQ ID NO: 10318 - RNA, 21 nt, artificial
  Oligomer
ucucauugucacacuccucga

SEQ ID NO: 10319 - RNA, 21 nt, artificial
  Oligomer
acucauagcgagcaauggugg

SEQ ID NO: 10320 - RNA, 21 nt, artificial
  Oligomer
uucagauacaaguagucacca

SEQ ID NO: 10321 - RNA, 21 nt, artificial
  Oligomer
auugagaccucggauaagccg

SEQ ID NO: 10322 - RNA, 21 nt, artificial
  Oligomer
cuggagcagaugaacaugagg

SEQ ID NO: 10323 - RNA, 21 nt, artificial
  Oligomer
gagccuggaguacaaaguuca

SEQ ID NO: 10324 - RNA, 21 nt, artificial
  Oligomer
ugguggaacuggauguucugg

SEQ ID NO: 10325 - RNA, 21 nt, artificial
  Oligomer
augaagcugcagucgaaguug

SEQ ID NO: 10326 - RNA, 21 nt, artificial
  Oligomer
cacaaaccacucgaaagaccg

SEQ ID NO: 10327 - RNA, 21 nt, artificial
  Oligomer
cuguugauccagauaaagucc

SEQ ID NO: 10328 - RNA, 21 nt, artificial
  Oligomer
auggagcuucauguugucuug

SEQ ID NO: 10329 - RNA, 21 nt, artificial
  Oligomer
aguacaaaguucacaguguga

SEQ ID NO: 10330 - RNA, 21 nt, artificial
  Oligomer
aaaguucacagugugagccac

SEQ ID NO: 10331 - RNA, 21 nt, artificial
  Oligomer
aaguucacagugugagccaca

SEQ ID NO: 10332 - RNA, 21 nt, artificial
  Oligomer
uagggcaaagaaucgcucugc

SEQ ID NO: 10333 - RNA, 21 nt, artificial
  Oligomer
caucuucuccugcaauggucu

SEQ ID NO: 10334 - RNA, 21 nt, artificial
  Oligomer
gaugucauguacauaugcagc

SEQ ID NO: 10335 - RNA, 21 nt, artificial
  Oligomer
acaaaccacucgaaagaccgc

SEQ ID NO: 10336 - RNA, 21 nt, artificial
  Oligomer
guuacagaauuuguguuucuc

SEQ ID NO: 10337 - RNA, 21 nt, artificial
  Oligomer
ugaaggacucauacagccugu

SEQ ID NO: 10338 - RNA, 21 nt, artificial
  Oligomer
auggauugagaccucggauaa

SEQ ID NO: 10339 - RNA, 21 nt, artificial
  Oligomer
aauagaacaccucaaaguggc

SEQ ID NO: 10340 - RNA, 21 nt, artificial
  Oligomer
gaguacaaaguucacagugug

SEQ ID NO: 10341 - RNA, 21 nt, artificial
  Oligomer
uaagcugguggaacuggaugu

SEQ ID NO: 10342 - RNA, 21 nt, artificial
  Oligomer
uggaacuggauguucuggucc

SEQ ID NO: 10343 - RNA, 21 nt, artificial
  Oligomer
aagaggaauuugaguuugucc

SEQ ID NO: 10344 - RNA, 21 nt, artificial
  Oligomer
agaaucgcucugcaaagaagg

SEQ ID NO: 10345 - RNA, 21 nt, artificial
  Oligomer
ugaggcuagaaauucucuugg

SEQ ID NO: 10346 - RNA, 21 nt, artificial
  Oligomer
gaccaagaacccaccaauucc

SEQ ID NO: 10347 - RNA, 21 nt, artificial
  Oligomer
ucuccaguuuagucagcaggc

SEQ ID NO: 10348 - RNA, 21 nt, artificial
  Oligomer
aaagaccgcuggucucuguug

SEQ ID NO: 10349 - RNA, 21 nt, artificial
  Oligomer
auguagcacuugauguuacag

SEQ ID NO: 10350 - RNA, 21 nt, artificial
  Oligomer
aguaucucagagcccuuggac

SEQ ID NO: 10351 - RNA, 21 nt, artificial
  Oligomer
uuugacucuuucucauuguca

SEQ ID NO: 10352 - RNA, 21 nt, artificial
  Oligomer
auguucagauacaaguaguca

SEQ ID NO: 10353 - RNA, 21 nt, artificial
  Oligomer
aaguagucaccaggucuauag

SEQ ID NO: 10354 - RNA, 21 nt, artificial
  Oligomer
aacaccucaaaguggccacuc

SEQ ID NO: 10355 - RNA, 21 nt, artificial
  Oligomer
acaaaguucacagugugagcc

SEQ ID NO: 10356 - RNA, 21 nt, artificial
  Oligomer
aagcugguggaacuggauguu

SEQ ID NO: 10357 - RNA, 21 nt, artificial
  Oligomer
guggaacuggauguucugguc

SEQ ID NO: 10358 - RNA, 21 nt, artificial
  Oligomer
aagcugcagucgaaguugagg

SEQ ID NO: 10359 - RNA, 21 nt, artificial
  Oligomer
augcagagcugcuuugaauuc

SEQ ID NO: 10360 - RNA, 21 nt, artificial
  Oligomer
gugaggcuagaaauucucuug

SEQ ID NO: 10361 - RNA, 21 nt, artificial
  Oligomer
aaucugaagccgaacuucuca

SEQ ID NO: 10362 - RNA, 21 nt, artificial
  Oligomer
accuugcccuucuucucagca

SEQ ID NO: 10363 - RNA, 21 nt, artificial
  Oligomer
gugauggagucuuucuucucc

SEQ ID NO: 10364 - RNA, 21 nt, artificial
  Oligomer
uucuucuccuuguuggccagg

SEQ ID NO: 10365 - RNA, 21 nt, artificial
  Oligomer
caguuuagucagcaggcucac

SEQ ID NO: 10366 - RNA, 21 nt, artificial
  Oligomer
auaaaguccaccuuauggagc

SEQ ID NO: 10367 - RNA, 21 nt, artificial
  Oligomer
cuuauggagcuucauguuguc

SEQ ID NO: 10368 - RNA, 21 nt, artificial
  Oligomer
uuauggagcuucauguugucu

SEQ ID NO: 10369 - RNA, 21 nt, artificial
  Oligomer
cuucauguugucuuggacacc

SEQ ID NO: 10370 - RNA, 21 nt, artificial
  Oligomer
uacagccuguuuguccacugg

SEQ ID NO: 10371 - RNA, 21 nt, artificial
  Oligomer
guucagauacaaguagucacc

SEQ ID NO: 10372 - RNA, 21 nt, artificial
  Oligomer
ugaggagaugagugaccuugg

SEQ ID NO: 10373 - RNA, 21 nt, artificial
  Oligomer
acuaagggcuucauaggcguc

SEQ ID NO: 10374 - RNA, 21 nt, artificial
  Oligomer
cucuuucacaugcagagcugc

SEQ ID NO: 10375 - RNA, 21 nt, artificial
  Oligomer
cugcuuugaauucuugcaggc

SEQ ID NO: 10376 - RNA, 21 nt, artificial
  Oligomer
ugcaauggucuuaaacugcug

SEQ ID NO: 10377 - RNA, 21 nt, artificial
  Oligomer
uugaagucagugagaccaaga

SEQ ID NO: 10378 - RNA, 21 nt, artificial
  Oligomer
uuucuggaacaccuugcucca

SEQ ID NO: 10379 - RNA, 21 nt, artificial
  Oligomer
ugauggagucuuucuucuccu

SEQ ID NO: 10380 - RNA, 21 nt, artificial
  Oligomer
uucauguugucuuggacaccu

SEQ ID NO: 10381 - RNA, 21 nt, artificial
  Oligomer
ugucuuggacaccuucgaucc

SEQ ID NO: 10382 - RNA, 21 nt, artificial
  Oligomer
aacaugacugcauaccagccu

SEQ ID NO: 10383 - RNA, 21 nt, artificial
  Oligomer
cagauacaaguagucaccagg

SEQ ID NO: 10384 - RNA, 21 nt, artificial
  Oligomer
cuccaggaaaaacaagauucc

SEQ ID NO: 10385 - RNA, 21 nt, artificial
  Oligomer
gacuaagggcuucauaggcgu

SEQ ID NO: 10386 - RNA, 21 nt, artificial
  Oligomer
ugauggugccacuucuaucgg

SEQ ID NO: 10387 - RNA, 21 nt, artificial
  Oligomer
aagaaggacucuuucacaugc

SEQ ID NO: 10388 - RNA, 21 nt, artificial
  Oligomer
uuucacaugcagagcugcuuu

SEQ ID NO: 10389 - RNA, 21 nt, artificial
  Oligomer
auggucuuaaacugcugaguc

SEQ ID NO: 10390 - RNA, 21 nt, artificial
  Oligomer
aaaaaucugaagccgaacuuc

SEQ ID NO: 10391 - RNA, 21 nt, artificial
  Oligomer
uagaaggacuaagggcuucau

SEQ ID NO: 10392 - RNA, 21 nt, artificial
  Oligomer
uagucagcaggcucacaaacc

SEQ ID NO: 10393 - RNA, 21 nt, artificial
  Oligomer
uuuucuggugccuguacauga

SEQ ID NO: 10394 - RNA, 21 nt, artificial
  Oligomer
cuugaaggacucauacagccu

SEQ ID NO: 10395 - RNA, 21 nt, artificial
  Oligomer
aaagaugagcagaagccacac

SEQ ID NO: 10396 - RNA, 21 nt, artificial
  Oligomer
ucacagugugagccacagugu

SEQ ID NO: 10397 - RNA, 21 nt, artificial
  Oligomer
agcugguggaacuggauguuc

SEQ ID NO: 10398 - RNA, 21 nt, artificial
  Oligomer
agaaggacucuuucacaugca

SEQ ID NO: 10399 - RNA, 21 nt, artificial
  Oligomer
agcugcuuugaauucuugcag

SEQ ID NO: 10400 - RNA, 21 nt, artificial
  Oligomer
aaaucugaagccgaacuucuc

SEQ ID NO: 10401 - RNA, 21 nt, artificial
  Oligomer
aucugaagccgaacuucucac

SEQ ID NO: 10402 - RNA, 21 nt, artificial
  Oligomer
cuuucuggaacaccuugcucc

SEQ ID NO: 10403 - RNA, 21 nt, artificial
  Oligomer
ucauguacauaugcagcucca

SEQ ID NO: 10404 - RNA, 21 nt, artificial
  Oligomer
cauguacauaugcagcuccag

SEQ ID NO: 10405 - RNA, 21 nt, artificial
  Oligomer
uuggacaccuucgauccagga

SEQ ID NO: 10406 - RNA, 21 nt, artificial
  Oligomer
caugcucagaggcaaagaucc

SEQ ID NO: 10407 - RNA, 21 nt, artificial
  Oligomer
ucugaugccuugaaggacuca

SEQ ID NO: 10408 - RNA, 21 nt, artificial
  Oligomer
gaugccuugaaggacucauac

SEQ ID NO: 10409 - RNA, 21 nt, artificial
  Oligomer
caggaaaaacaagauuccagg

SEQ ID NO: 10410 - RNA, 21 nt, artificial
  Oligomer
aggaaaaacaagauuccaggc

SEQ ID NO: 10411 - RNA, 21 nt, artificial
  Oligomer
acaagauuccaggcaccagca

SEQ ID NO: 10412 - RNA, 21 nt, artificial
  Oligomer
uuccagaaguugggcccauga

SEQ ID NO: 10413 - RNA, 21 nt, artificial
  Oligomer
uaggacaggugaguccaauag

SEQ ID NO: 10414 - RNA, 21 nt, artificial
  Oligomer
caauagaacaccucaaagugg

SEQ ID NO: 10415 - RNA, 21 nt, artificial
  Oligomer
acgaaggccauagcaaaagcg

SEQ ID NO: 10416 - RNA, 21 nt, artificial
  Oligomer
cugguggaacuggauguucug

SEQ ID NO: 10417 - RNA, 21 nt, artificial
  Oligomer
auggugccacuucuaucggag

SEQ ID NO: 10418 - RNA, 21 nt, artificial
  Oligomer
aaucgcucugcaaagaaggac

SEQ ID NO: 10419 - RNA, 21 nt, artificial
  Oligomer
ucgcucugcaaagaaggacuc

SEQ ID NO: 10420 - RNA, 21 nt, artificial
  Oligomer
ucugcaaagaaggacucuuuc

SEQ ID NO: 10421 - RNA, 21 nt, artificial
  Oligomer
acucuuucacaugcagagcug

SEQ ID NO: 10422 - RNA, 21 nt, artificial
  Oligomer
ugcuuugaauucuugcaggcu

SEQ ID NO: 10423 - RNA, 21 nt, artificial
  Oligomer
ucuuaaacugcugagucaccc

SEQ ID NO: 10424 - RNA, 21 nt, artificial
  Oligomer
aggugaggcuagaaauucucu

SEQ ID NO: 10425 - RNA, 21 nt, artificial
  Oligomer
ucuuucuucuccuuguuggcc

SEQ ID NO: 10426 - RNA, 21 nt, artificial
  Oligomer
ucuugcccagugcagauguca

SEQ ID NO: 10427 - RNA, 21 nt, artificial
  Oligomer
ugucauguacauaugcagcuc

SEQ ID NO: 10428 - RNA, 21 nt, artificial
  Oligomer
uggugccuguacaugauacuc

SEQ ID NO: 10429 - RNA, 21 nt, artificial
  Oligomer
auugucacacuccucgacagc

SEQ ID NO: 10430 - RNA, 21 nt, artificial
  Oligomer
gccuugaaggacucauacagc

SEQ ID NO: 10431 - RNA, 21 nt, artificial
  Oligomer
uugaaggacucauacagccug

SEQ ID NO: 10432 - RNA, 21 nt, artificial
  Oligomer
aaggacucauacagccuguuu

SEQ ID NO: 10433 - RNA, 21 nt, artificial
  Oligomer
acaacaugacugcauaccagc

SEQ ID NO: 10434 - RNA, 21 nt, artificial
  Oligomer
auagugucuuucugcucagga

SEQ ID NO: 10435 - RNA, 21 nt, artificial
  Oligomer
agauacaaguagucaccaggu

SEQ ID NO: 10436 - RNA, 21 nt, artificial
  Oligomer
augaggagaugagugaccuug

SEQ ID NO: 10437 - RNA, 21 nt, artificial
  Oligomer
acuuccaugaugcacacggcu

SEQ ID NO: 10438 - RNA, 21 nt, artificial
  Oligomer
augaaagaugagcagaagcca

SEQ ID NO: 10439 - RNA, 21 nt, artificial
  Oligomer
gaacuggagcagaugaacaug

SEQ ID NO: 10440 - RNA, 21 nt, artificial
  Oligomer
aacuggauguucugguccagu

SEQ ID NO: 10441 - RNA, 21 nt, artificial
  Oligomer
auacaccuggaagaggaauuu

SEQ ID NO: 10442 - RNA, 21 nt, artificial
  Oligomer
aaauagggcaaagaaucgcuc

SEQ ID NO: 10443 - RNA, 21 nt, artificial
  Oligomer
aucgcucugcaaagaaggacu

SEQ ID NO: 10444 - RNA, 21 nt, artificial
  Oligomer
aaagaaggacucuuucacaug

SEQ ID NO: 10445 - RNA, 21 nt, artificial
  Oligomer
uucacaugcagagcugcuuug

SEQ ID NO: 10446 - RNA, 21 nt, artificial
  Oligomer
cagagcugcuuugaauucuug

SEQ ID NO: 10447 - RNA, 21 nt, artificial
  Oligomer
cuuaaacugcugagucaccca

SEQ ID NO: 10448 - RNA, 21 nt, artificial
  Oligomer
gaggcuagaaauucucuugga

SEQ ID NO: 10449 - RNA, 21 nt, artificial
  Oligomer
ucuuggaaaaaucugaagccg

SEQ ID NO: 10450 - RNA, 21 nt, artificial
  Oligomer
cuuggaaaaaucugaagccga

SEQ ID NO: 10451 - RNA, 21 nt, artificial
  Oligomer
uggaacaccuugcuccaguca

SEQ ID NO: 10452 - RNA, 21 nt, artificial
  Oligomer
gcagaugucauguacauaugc

SEQ ID NO: 10453 - RNA, 21 nt, artificial
  Oligomer
augucauguacauaugcagcu

SEQ ID NO: 10454 - RNA, 21 nt, artificial
  Oligomer
cucacaaaccacucgaaagac

SEQ ID NO: 10455 - RNA, 21 nt, artificial
  Oligomer
gauaaaguccaccuuauggag

SEQ ID NO: 10456 - RNA, 21 nt, artificial
  Oligomer
uaaaguccaccuuauggagcu

SEQ ID NO: 10457 - RNA, 21 nt, artificial
  Oligomer
auacucugcagaauggaagca

SEQ ID NO: 10458 - RNA, 21 nt, artificial
  Oligomer
uacucugcagaauggaagcaa

SEQ ID NO: 10459 - RNA, 21 nt, artificial
  Oligomer
cugcagaauggaagcaaaggg

SEQ ID NO: 10460 - RNA, 21 nt, artificial
  Oligomer
caacaugacugcauaccagcc

SEQ ID NO: 10461 - RNA, 21 nt, artificial
  Oligomer
uagucaccaggucuauaguga

SEQ ID NO: 10462 - RNA, 21 nt, artificial
  Oligomer
gagguugacuuccaugaugca

SEQ ID NO: 10463 - RNA, 21 nt, artificial
  Oligomer
uccaggaaaaacaagauucca

SEQ ID NO: 10464 - RNA, 21 nt, artificial
  Oligomer
aagaugagcagaagccacacg

SEQ ID NO: 10465 - RNA, 21 nt, artificial
  Oligomer
aggugaguccaauagaacacc

SEQ ID NO: 10466 - RNA, 21 nt, artificial
  Oligomer
gaacuggauguucugguccag

SEQ ID NO: 10467 - RNA, 21 nt, artificial
  Oligomer
auggucagguucuccaugacu

SEQ ID NO: 10468 - RNA, 21 nt, artificial
  Oligomer
cucuuggaaaaaucugaagcc

SEQ ID NO: 10469 - RNA, 21 nt, artificial
  Oligomer
aaaaucugaagccgaacuucu

SEQ ID NO: 10470 - RNA, 21 nt, artificial
  Oligomer
uucuggaacaccuugcuccag

SEQ ID NO: 10471 - RNA, 21 nt, artificial
  Oligomer
auguacauaugcagcuccagg

SEQ ID NO: 10472 - RNA, 21 nt, artificial
  Oligomer
aagaccgcuggucucuguuga

SEQ ID NO: 10473 - RNA, 21 nt, artificial
  Oligomer
cagauaaaguccaccuuaugg

SEQ ID NO: 10474 - RNA, 21 nt, artificial
  Oligomer
aaguccaccuuauggagcuuc

SEQ ID NO: 10475 - RNA, 21 nt, artificial
  Oligomer
uaugcuuucuuuucuggugcc

SEQ ID NO: 10476 - RNA, 21 nt, artificial
  Oligomer
augcuuucuuuucuggugccu

SEQ ID NO: 10477 - RNA, 21 nt, artificial
  Oligomer
ucgauguagcacuugauguua

SEQ ID NO: 10478 - RNA, 21 nt, artificial
  Oligomer
ggagguugacuuccaugaugc

SEQ ID NO: 10479 - RNA, 21 nt, artificial
  Oligomer
ugaguccaauagaacaccuca

SEQ ID NO: 10480 - RNA, 21 nt, artificial
  Oligomer
ggaauuugaguuuguccaugg

SEQ ID NO: 10481 - RNA, 21 nt, artificial
  Oligomer
gucaaauagggcaaagaaucg

SEQ ID NO: 10482 - RNA, 21 nt, artificial
  Oligomer
ucacaugcagagcugcuuuga

SEQ ID NO: 10483 - RNA, 21 nt, artificial
  Oligomer
cuagaaggacuaagggcuuca

SEQ ID NO: 10484 - RNA, 21 nt, artificial
  Oligomer
agaugucauguacauaugcag

SEQ ID NO: 10485 - RNA, 21 nt, artificial
  Oligomer
accuuauggagcuucauguug

SEQ ID NO: 10486 - RNA, 21 nt, artificial
  Oligomer
agugucuuucugcucaggagc

SEQ ID NO: 10487 - RNA, 21 nt, artificial
  Oligomer
aggacuaagggcuucauaggc

SEQ ID NO: 10488 - RNA, 21 nt, artificial
  Oligomer
agaugagcagaagccacacga

SEQ ID NO: 10489 - RNA, 21 nt, artificial
  Oligomer
uagaacaccucaaaguggcca

SEQ ID NO: 10490 - RNA, 21 nt, artificial
  Oligomer
acuaccacguagcccauaagc

SEQ ID NO: 10491 - RNA, 21 nt, artificial
  Oligomer
uaccacguagcccauaagcug

SEQ ID NO: 10492 - RNA, 21 nt, artificial
  Oligomer
gaagaggaauuugaguuuguc

SEQ ID NO: 10493 - RNA, 21 nt, artificial
  Oligomer
gugauggugccacuucuaucg

SEQ ID NO: 10494 - RNA, 21 nt, artificial
  Oligomer
caaauagggcaaagaaucgcu

SEQ ID NO: 10495 - RNA, 21 nt, artificial
  Oligomer
aaagaaucgcucugcaaagaa

SEQ ID NO: 10496 - RNA, 21 nt, artificial
  Oligomer
gaggugaggcuagaaauucuc

SEQ ID NO: 10497 - RNA, 21 nt, artificial
  Oligomer
gucuuucuucuccuuguuggc

SEQ ID NO: 10498 - RNA, 21 nt, artificial
  Oligomer
ggccuucaugucauucuugcc

SEQ ID NO: 10499 - RNA, 21 nt, artificial
  Oligomer
augucauucuugcccagugca

SEQ ID NO: 10500 - RNA, 21 nt, artificial
  Oligomer
auucuugcccagugcagaugu

SEQ ID NO: 10501 - RNA, 21 nt, artificial
  Oligomer
gauagugucuuucugcucagg

SEQ ID NO: 10502 - RNA, 21 nt, artificial
  Oligomer
acaugacugcauaccagccug

SEQ ID NO: 10503 - RNA, 21 nt, artificial
  Oligomer
uugggcccaugaaagaugagc

SEQ ID NO: 10504 - RNA, 21 nt, artificial
  Oligomer
gugaguccaauagaacaccuc

SEQ ID NO: 10505 - RNA, 21 nt, artificial
  Oligomer
agaacaccucaaaguggccac

SEQ ID NO: 10506 - RNA, 21 nt, artificial
  Oligomer
augcaggaacuggagcagaug

SEQ ID NO: 10507 - RNA, 21 nt, artificial
  Oligomer
uacaccuggaagaggaauuug

SEQ ID NO: 10508 - RNA, 21 nt, artificial
  Oligomer
ccugcaauggucuuaaacugc

SEQ ID NO: 10509 - RNA, 21 nt, artificial
  Oligomer
auucuugaagucagugagacc

SEQ ID NO: 10510 - RNA, 21 nt, artificial
  Oligomer
uucucuuggaaaaaucugaag

SEQ ID NO: 10511 - RNA, 21 nt, artificial
  Oligomer
ucucuuggaaaaaucugaagc

SEQ ID NO: 10512 - RNA, 21 nt, artificial
  Oligomer
ugcccagugcagaugucaugu

SEQ ID NO: 10513 - RNA, 21 nt, artificial
  Oligomer
augcucagaggcaaagauccu

SEQ ID NO: 10514 - RNA, 21 nt, artificial
  Oligomer
caugaaagaugagcagaagcc

SEQ ID NO: 10515 - RNA, 21 nt, artificial
  Oligomer
augucauacaccuggaagagg

SEQ ID NO: 10516 - RNA, 21 nt, artificial
  Oligomer
aaaguccaccuuauggagcuu

SEQ ID NO: 10517 - RNA, 21 nt, artificial
  Oligomer
gugccuguacaugauacucug

SEQ ID NO: 10518 - RNA, 21 nt, artificial
  Oligomer
gauguucagauacaaguaguc

SEQ ID NO: 10519 - RNA, 21 nt, artificial
  Oligomer
aauggucuuaaacugcugagu

SEQ ID NO: 10520 - RNA, 21 nt, artificial
  Oligomer
uucauucuugaagucagugag

SEQ ID NO: 10521 - RNA, 21 nt, artificial
  Oligomer
uucuugaagucagugagacca

SEQ ID NO: 10522 - RNA, 21 nt, artificial
  Oligomer
aagucagugagaccaagaacc

SEQ ID NO: 10523 - RNA, 21 nt, artificial
  Oligomer
uucucagcagccacuuucugg

SEQ ID NO: 10524 - RNA, 21 nt, artificial
  Oligomer
gagucuuucuucuccuuguug

SEQ ID NO: 10525 - RNA, 21 nt, artificial
  Oligomer
caauggucuuaaacugcugag

SEQ ID NO: 10526 - RNA, 21 nt, artificial
  Oligomer
agucagugagaccaagaaccc

SEQ ID NO: 10527 - RNA, 21 nt, artificial
  Oligomer
auggccuucaugucauucuug

SEQ ID NO: 10528 - RNA, 21 nt, artificial
  Oligomer
agccagauagugucuuucugc

SEQ ID NO: 10529 - RNA, 21 nt, artificial
  Oligomer
uuucugcucaggagcacugcu

SEQ ID NO: 10530 - RNA, 21 nt, artificial
  Oligomer
aacuggagcagaugaacauga

SEQ ID NO: 10531 - RNA, 21 nt, artificial
  Oligomer
agcagccacuuccagaaguug

SEQ ID NO: 10532 - RNA, 21 nt, artificial
  Oligomer
caccuggaagaggaauuugag

SEQ ID NO: 10533 - RNA, 21 nt, artificial
  Oligomer
ucauucuugaagucagugaga

SEQ ID NO: 10534 - RNA, 21 nt, artificial
  Oligomer
uucuugcccagugcagauguc

SEQ ID NO: 10535 - RNA, 21 nt, artificial
  Oligomer
agugagaccaagaacccacca

SEQ ID NO: 10536 - RNA, 21 nt, artificial
  Oligomer
aauggccuucaugucauucuu

SEQ ID NO: 10537 - RNA, 21 nt, artificial
  Oligomer
uggccuucaugucauucuugc

SEQ ID NO: 10538 - RNA, 21 nt, artificial
  Oligomer
acuggagcagaugaacaugag

SEQ ID NO: 10539 - RNA, 21 nt, artificial
  Oligomer
agauagugucuuucugcucag

SEQ ID NO: 10540 - RNA, 21 nt, artificial
  Oligomer
ugcggcuucauucuugaaguc

SEQ ID NO: 10541 - RNA, 19 nt, artificial
  Oligomer
cccagacaauuauacaaau

SEQ ID NO: 10542 - RNA, 19 nt, artificial
  Oligomer
acccagacaauuauacaaa

SEQ ID NO: 10543 - RNA, 19 nt, artificial
  Oligomer
cuaauugacuuccacaaaa

SEQ ID NO: 10544 - RNA, 19 nt, artificial
  Oligomer
agaauauugacccagacaa

SEQ ID NO: 10545 - RNA, 19 nt, artificial
  Oligomer
caguacucgaucucaauuc

SEQ ID NO: 10546 - RNA, 19 nt, artificial
  Oligomer
ucaguacucgaucucaauu

SEQ ID NO: 10547 - RNA, 19 nt, artificial
  Oligomer
gaauauugacccagacaau

SEQ ID NO: 10548 - RNA, 19 nt, artificial
  Oligomer
ccacuuuccacaucuacuu

SEQ ID NO: 10549 - RNA, 19 nt, artificial
  Oligomer
gggaggauuuucacuucau

SEQ ID NO: 10550 - RNA, 19 nt, artificial
  Oligomer
ggagcuauuuaggaaggcu

SEQ ID NO: 10551 - RNA, 19 nt, artificial
  Oligomer
ugguccuacuaaauauacu

SEQ ID NO: 10552 - RNA, 19 nt, artificial
  Oligomer
cucuaauugacuuccacaa

SEQ ID NO: 10553 - RNA, 19 nt, artificial
  Oligomer
gccacgcagucaaugucua

SEQ ID NO: 10554 - RNA, 19 nt, artificial
  Oligomer
ccaacaccacccuaaacca

SEQ ID NO: 10555 - RNA, 19 nt, artificial
  Oligomer
ggaggacaacauagugguu

SEQ ID NO: 10556 - RNA, 19 nt, artificial
  Oligomer
ccuuuuucaucgggcucuu

SEQ ID NO: 10557 - RNA, 19 nt, artificial
  Oligomer
ggaggugaaaagguacaau

SEQ ID NO: 10558 - RNA, 19 nt, artificial
  Oligomer
gucuaauguuuaccaugua

SEQ ID NO: 10559 - RNA, 19 nt, artificial
  Oligomer
cccgucuaauguuuaccau

SEQ ID NO: 10560 - RNA, 19 nt, artificial
  Oligomer
accucauccuguccaacaa

SEQ ID NO: 10561 - RNA, 19 nt, artificial
  Oligomer
ucaaccucauccuguccaa

SEQ ID NO: 10562 - RNA, 19 nt, artificial
  Oligomer
agacaucugaacccaacac

SEQ ID NO: 10563 - RNA, 19 nt, artificial
  Oligomer
caguuuugguccuacuaaa

SEQ ID NO: 10564 - RNA, 19 nt, artificial
  Oligomer
ccagauauucaguacucga

SEQ ID NO: 10565 - RNA, 19 nt, artificial
  Oligomer
cccaaagugucagcaacuu

SEQ ID NO: 10566 - RNA, 19 nt, artificial
  Oligomer
ugaccaagaauguagagaa

SEQ ID NO: 10567 - RNA, 19 nt, artificial
  Oligomer
cuguuguccuggccauuuu

SEQ ID NO: 10568 - RNA, 19 nt, artificial
  Oligomer
gccgcaaccucauaaccuu

SEQ ID NO: 10569 - RNA, 19 nt, artificial
  Oligomer
ccuucauguucucuuauau

SEQ ID NO: 10570 - RNA, 19 nt, artificial
  Oligomer
ggaggauuuucacuucaug

SEQ ID NO: 10571 - RNA, 19 nt, artificial
  Oligomer
acgaauucuucaccaugau

SEQ ID NO: 10572 - RNA, 19 nt, artificial
  Oligomer
ugccagauauucaguacuc

SEQ ID NO: 10573 - RNA, 19 nt, artificial
  Oligomer
ggcaccaggaaacaaagau

SEQ ID NO: 10574 - RNA, 19 nt, artificial
  Oligomer
gaggugaaaagguacaaua

SEQ ID NO: 10575 - RNA, 19 nt, artificial
  Oligomer
ggucccggcaaucaucuau

SEQ ID NO: 10576 - RNA, 19 nt, artificial
  Oligomer
uccuucauguucucuuaua

SEQ ID NO: 10577 - RNA, 19 nt, artificial
  Oligomer
gaagacaucugaacccaac

SEQ ID NO: 10578 - RNA, 19 nt, artificial
  Oligomer
gcagucccaucaucaucca

SEQ ID NO: 10579 - RNA, 19 nt, artificial
  Oligomer
caagaagcuacaaaagaaa

SEQ ID NO: 10580 - RNA, 19 nt, artificial
  Oligomer
gccagauauucaguacucg

SEQ ID NO: 10581 - RNA, 19 nt, artificial
  Oligomer
caaaaucgaugcguugcuu

SEQ ID NO: 10582 - RNA, 19 nt, artificial
  Oligomer
ggagacuauguucuacaau

SEQ ID NO: 10583 - RNA, 19 nt, artificial
  Oligomer
ggcauaaauuugagguguc

SEQ ID NO: 10584 - RNA, 19 nt, artificial
  Oligomer
ccggcaaucaucuauggag

SEQ ID NO: 10585 - RNA, 19 nt, artificial
  Oligomer
ugcccacuuuccacaucua

SEQ ID NO: 10586 - RNA, 19 nt, artificial
  Oligomer
ccaacgucuuugugaauga

SEQ ID NO: 10587 - RNA, 19 nt, artificial
  Oligomer
ccaucuguguuggcguguu

SEQ ID NO: 10588 - RNA, 19 nt, artificial
  Oligomer
acaccacccuaaaccacag

SEQ ID NO: 10589 - RNA, 19 nt, artificial
  Oligomer
cuauuuaggaaggcuguga

SEQ ID NO: 10590 - RNA, 19 nt, artificial
  Oligomer
gagcuauuuaggaaggcug

SEQ ID NO: 10591 - RNA, 19 nt, artificial
  Oligomer
gaaggagcuauuuaggaag

SEQ ID NO: 10592 - RNA, 19 nt, artificial
  Oligomer
gcgagaaggagcuauuuag

SEQ ID NO: 10593 - RNA, 19 nt, artificial
  Oligomer
cccugacugugcuugacuu

SEQ ID NO: 10594 - RNA, 19 nt, artificial
  Oligomer
gcuacugguuugagaacac

SEQ ID NO: 10595 - RNA, 19 nt, artificial
  Oligomer
ccauuguccucgaccaguu

SEQ ID NO: 10596 - RNA, 19 nt, artificial
  Oligomer
gggucugcaacaacuacug

SEQ ID NO: 10597 - RNA, 19 nt, artificial
  Oligomer
cuggugucuacaugagaaa

SEQ ID NO: 10598 - RNA, 19 nt, artificial
  Oligomer
ccuggugucuacaugagaa

SEQ ID NO: 10599 - RNA, 19 nt, artificial
  Oligomer
cugccagauauucaguacu

SEQ ID NO: 10600 - RNA, 19 nt, artificial
  Oligomer
ucuaauugacuuccacaaa

SEQ ID NO: 10601 - RNA, 19 nt, artificial
  Oligomer
caucucuaauugacuucca

SEQ ID NO: 10602 - RNA, 19 nt, artificial
  Oligomer
ccaaagaagauaaagacca

SEQ ID NO: 10603 - RNA, 19 nt, artificial
  Oligomer
cagugcaugaugauuauaa

SEQ ID NO: 10604 - RNA, 19 nt, artificial
  Oligomer
gcagugcaugaugauuaua

SEQ ID NO: 10605 - RNA, 19 nt, artificial
  Oligomer
ccaagaauguagagaaggc

SEQ ID NO: 10606 - RNA, 19 nt, artificial
  Oligomer
gcaauggcugugcuggaua

SEQ ID NO: 10607 - RNA, 19 nt, artificial
  Oligomer
ccaaggcuuugaguacaag

SEQ ID NO: 10608 - RNA, 19 nt, artificial
  Oligomer
gcaaucaucuauggaggug

SEQ ID NO: 10609 - RNA, 19 nt, artificial
  Oligomer
gucuacaucuucucaguca

SEQ ID NO: 10610 - RNA, 19 nt, artificial
  Oligomer
agacuuuccucaaccgcua

SEQ ID NO: 10611 - RNA, 19 nt, artificial
  Oligomer
gcaaccucauaaccuuccu

SEQ ID NO: 10612 - RNA, 19 nt, artificial
  Oligomer
cuaauguuuaccauguaug

SEQ ID NO: 10613 - RNA, 19 nt, artificial
  Oligomer
ccaucaucauccagcugcu

SEQ ID NO: 10614 - RNA, 19 nt, artificial
  Oligomer
agaagacaucugaacccaa

SEQ ID NO: 10615 - RNA, 19 nt, artificial
  Oligomer
cuacaaaagaaacucaaag

SEQ ID NO: 10616 - RNA, 19 nt, artificial
  Oligomer
gcuacaaaagaaacucaaa

SEQ ID NO: 10617 - RNA, 19 nt, artificial
  Oligomer
gcaacaacuacuggauucg

SEQ ID NO: 10618 - RNA, 19 nt, artificial
  Oligomer
ugcaacaacuacuggauuc

SEQ ID NO: 10619 - RNA, 19 nt, artificial
  Oligomer
ggugucuacaugagaaaug

SEQ ID NO: 10620 - RNA, 19 nt, artificial
  Oligomer
acaaaaucgaugcguugcu

SEQ ID NO: 10621 - RNA, 19 nt, artificial
  Oligomer
cccacaucucuaauugacu

SEQ ID NO: 10622 - RNA, 19 nt, artificial
  Oligomer
ugcagugcaugaugauuau

SEQ ID NO: 10623 - RNA, 19 nt, artificial
  Oligomer
ccaucagaauccaccuuag

SEQ ID NO: 10624 - RNA, 19 nt, artificial
  Oligomer
cccacuucaugcaccacua

SEQ ID NO: 10625 - RNA, 19 nt, artificial
  Oligomer
ggcuuugaguacaagucag

SEQ ID NO: 10626 - RNA, 19 nt, artificial
  Oligomer
gucccggcaaucaucuaug

SEQ ID NO: 10627 - RNA, 19 nt, artificial
  Oligomer
uggccaucauguaugucuu

SEQ ID NO: 10628 - RNA, 19 nt, artificial
  Oligomer
caacgucuuugugaaugau

SEQ ID NO: 10629 - RNA, 19 nt, artificial
  Oligomer
gcuguuguccuggccauuu

SEQ ID NO: 10630 - RNA, 19 nt, artificial
  Oligomer
agaucgugcuuacuacuau

SEQ ID NO: 10631 - RNA, 19 nt, artificial
  Oligomer
agaagagguuuggcaaaaa

SEQ ID NO: 10632 - RNA, 19 nt, artificial
  Oligomer
uggaaaugguauuagagau

SEQ ID NO: 10633 - RNA, 19 nt, artificial
  Oligomer
uggagguggaaaugguauu

SEQ ID NO: 10634 - RNA, 19 nt, artificial
  Oligomer
ggauuuucacuucaugcug

SEQ ID NO: 10635 - RNA, 19 nt, artificial
  Oligomer
ugacaugggaggauuuuca

SEQ ID NO: 10636 - RNA, 19 nt, artificial
  Oligomer
ugaagaaggaagcagccaa

SEQ ID NO: 10637 - RNA, 19 nt, artificial
  Oligomer
acaaaagaaacucaaagag

SEQ ID NO: 10638 - RNA, 19 nt, artificial
  Oligomer
cccuuagugagucugcuuc

SEQ ID NO: 10639 - RNA, 19 nt, artificial
  Oligomer
agcaaagauuuuaagagga

SEQ ID NO: 10640 - RNA, 19 nt, artificial
  Oligomer
ucagugccauuguccucga

SEQ ID NO: 10641 - RNA, 19 nt, artificial
  Oligomer
cugcaacaacuacuggauu

SEQ ID NO: 10642 - RNA, 19 nt, artificial
  Oligomer
ucagggucugcaacaacua

SEQ ID NO: 10643 - RNA, 19 nt, artificial
  Oligomer
cucucagggucugcaacaa

SEQ ID NO: 10644 - RNA, 19 nt, artificial
  Oligomer
ccaggucaagacauagaau

SEQ ID NO: 10645 - RNA, 19 nt, artificial
  Oligomer
cccugauauucuugauguc

SEQ ID NO: 10646 - RNA, 19 nt, artificial
  Oligomer
cacaucucuaauugacuuc

SEQ ID NO: 10647 - RNA, 19 nt, artificial
  Oligomer
uggaggugaaaagguacaa

SEQ ID NO: 10648 - RNA, 19 nt, artificial
  Oligomer
ucccaaagaagauaaagac

SEQ ID NO: 10649 - RNA, 19 nt, artificial
  Oligomer
aggagacuauguucuacaa

SEQ ID NO: 10650 - RNA, 19 nt, artificial
  Oligomer
gacccagacaauuauacaa

SEQ ID NO: 10651 - RNA, 19 nt, artificial
  Oligomer
cccggcaaucaucuaugga

SEQ ID NO: 10652 - RNA, 19 nt, artificial
  Oligomer
gcccacuuuccacaucuac

SEQ ID NO: 10653 - RNA, 19 nt, artificial
  Oligomer
ucaucauccauggcagcua

SEQ ID NO: 10654 - RNA, 19 nt, artificial
  Oligomer
uccuggccaucauguaugu

SEQ ID NO: 10655 - RNA, 19 nt, artificial
  Oligomer
agaaguucuauuggugguu

SEQ ID NO: 10656 - RNA, 19 nt, artificial
  Oligomer
cccaacgucuuugugaaug

SEQ ID NO: 10657 - RNA, 19 nt, artificial
  Oligomer
cuuauaucuugcucaccau

SEQ ID NO: 10658 - RNA, 19 nt, artificial
  Oligomer
gugcuuacuacuauggcuu

SEQ ID NO: 10659 - RNA, 19 nt, artificial
  Oligomer
aggauuuucacuucaugcu

SEQ ID NO: 10660 - RNA, 19 nt, artificial
  Oligomer
ugggaggauuuucacuuca

SEQ ID NO: 10661 - RNA, 19 nt, artificial
  Oligomer
ccagagagaaaggugagag

SEQ ID NO: 10662 - RNA, 19 nt, artificial
  Oligomer
gcuguuuaguucugaagag

SEQ ID NO: 10663 - RNA, 19 nt, artificial
  Oligomer
gucaaccucauccugucca

SEQ ID NO: 10664 - RNA, 19 nt, artificial
  Oligomer
cgagaacacaagaagcuac

SEQ ID NO: 10665 - RNA, 19 nt, artificial
  Oligomer
ccaaugucuuugucuggca

SEQ ID NO: 10666 - RNA, 19 nt, artificial
  Oligomer
acauccgaaauaccacccu

SEQ ID NO: 10667 - RNA, 19 nt, artificial
  Oligomer
gaagcaaagauuuuaagag

SEQ ID NO: 10668 - RNA, 19 nt, artificial
  Oligomer
cacagaagcaaagauuuua

SEQ ID NO: 10669 - RNA, 19 nt, artificial
  Oligomer
gugaucucaacccuaaugu

SEQ ID NO: 10670 - RNA, 19 nt, artificial
  Oligomer
ggcaaauucucccguacag

SEQ ID NO: 10671 - RNA, 19 nt, artificial
  Oligomer
acuacuggauucgggagaa

SEQ ID NO: 10672 - RNA, 19 nt, artificial
  Oligomer
ucugcaacaacuacuggau

SEQ ID NO: 10673 - RNA, 19 nt, artificial
  Oligomer
agggucugcaacaacuacu

SEQ ID NO: 10674 - RNA, 19 nt, artificial
  Oligomer
cucagggucugcaacaacu

SEQ ID NO: 10675 - RNA, 19 nt, artificial
  Oligomer
cccuggugucuacaugaga

SEQ ID NO: 10676 - RNA, 19 nt, artificial
  Oligomer
gcugagcuguaaaauauuu

SEQ ID NO: 10677 - RNA, 19 nt, artificial
  Oligomer
uccauacucagcucuuuaa

SEQ ID NO: 10678 - RNA, 19 nt, artificial
  Oligomer
ucgaugcguugcuuuggua

SEQ ID NO: 10679 - RNA, 19 nt, artificial
  Oligomer
gugaaaagguacaauagug

SEQ ID NO: 10680 - RNA, 19 nt, artificial
  Oligomer
ggugaaaagguacaauagu

SEQ ID NO: 10681 - RNA, 19 nt, artificial
  Oligomer
uccaucagaauccaccuua

SEQ ID NO: 10682 - RNA, 19 nt, artificial
  Oligomer
ccacuucaugcaccacuau

SEQ ID NO: 10683 - RNA, 19 nt, artificial
  Oligomer
gaaugaccaagaauguaga

SEQ ID NO: 10684 - RNA, 19 nt, artificial
  Oligomer
ccaaaugcuguguaagaag

SEQ ID NO: 10685 - RNA, 19 nt, artificial
  Oligomer
caauggcugugcuggauac

SEQ ID NO: 10686 - RNA, 19 nt, artificial
  Oligomer
caaucaucuauggagguga

SEQ ID NO: 10687 - RNA, 19 nt, artificial
  Oligomer
ggcaaucaucuauggaggu

SEQ ID NO: 10688 - RNA, 19 nt, artificial
  Oligomer
cggcaaucaucuauggagg

SEQ ID NO: 10689 - RNA, 19 nt, artificial
  Oligomer
cccacuuuccacaucuacu

SEQ ID NO: 10690 - RNA, 19 nt, artificial
  Oligomer
ucauaaccuuccugcgaga

SEQ ID NO: 10691 - RNA, 19 nt, artificial
  Oligomer
gcugacaugggaggauuuu

SEQ ID NO: 10692 - RNA, 19 nt, artificial
  Oligomer
ccaaggacgaauucuucac

SEQ ID NO: 10693 - RNA, 19 nt, artificial
  Oligomer
ccgucuaauguuuaccaug

SEQ ID NO: 10694 - RNA, 19 nt, artificial
  Oligomer
guuuaguucugaagaggaa

SEQ ID NO: 10695 - RNA, 19 nt, artificial
  Oligomer
gcugcuguuuaguucugaa

SEQ ID NO: 10696 - RNA, 19 nt, artificial
  Oligomer
ugcugcucaagaucccuaa

SEQ ID NO: 10697 - RNA, 19 nt, artificial
  Oligomer
uuaagaggaaagaagacau

SEQ ID NO: 10698 - RNA, 19 nt, artificial
  Oligomer
gcagcccaaugucuuuguc

SEQ ID NO: 10699 - RNA, 19 nt, artificial
  Oligomer
cagaagcaaagauuuuaag

SEQ ID NO: 10700 - RNA, 19 nt, artificial
  Oligomer
ccuccauacucagcucuuu

SEQ ID NO: 10701 - RNA, 19 nt, artificial
  Oligomer
cccuccauacucagcucuu

SEQ ID NO: 10702 - RNA, 19 nt, artificial
  Oligomer
cagauauucaguacucgau

SEQ ID NO: 10703 - RNA, 19 nt, artificial
  Oligomer
cagcccugauauucuugau

SEQ ID NO: 10704 - RNA, 19 nt, artificial
  Oligomer
ccagcccugauauucuuga

SEQ ID NO: 10705 - RNA, 19 nt, artificial
  Oligomer
gagggcaccaggaaacaaa

SEQ ID NO: 10706 - RNA, 19 nt, artificial
  Oligomer
cgaugcguugcuuugguau

SEQ ID NO: 10707 - RNA, 19 nt, artificial
  Oligomer
guguggaggugaaaaggua

SEQ ID NO: 10708 - RNA, 19 nt, artificial
  Oligomer
caaagaagauaaagaccac

SEQ ID NO: 10709 - RNA, 19 nt, artificial
  Oligomer
gcaugaugauuauaagucc

SEQ ID NO: 10710 - RNA, 19 nt, artificial
  Oligomer
ugcaccacuaugagaacuu

SEQ ID NO: 10711 - RNA, 19 nt, artificial
  Oligomer
uggcauaaauuugaggugu

SEQ ID NO: 10712 - RNA, 19 nt, artificial
  Oligomer
ucgccaccuaccagaacau

SEQ ID NO: 10713 - RNA, 19 nt, artificial
  Oligomer
ggaguggcauaaauuugag

SEQ ID NO: 10714 - RNA, 19 nt, artificial
  Oligomer
cugcccacuuuccacaucu

SEQ ID NO: 10715 - RNA, 19 nt, artificial
  Oligomer
ucuaugcccugcucaucau

SEQ ID NO: 10716 - RNA, 19 nt, artificial
  Oligomer
accucuacauccugcucua

SEQ ID NO: 10717 - RNA, 19 nt, artificial
  Oligomer
ccaucauguaugucuucgc

SEQ ID NO: 10718 - RNA, 19 nt, artificial
  Oligomer
ggccaucauguaugucuuc

SEQ ID NO: 10719 - RNA, 19 nt, artificial
  Oligomer
cuggccaucauguaugucu

SEQ ID NO: 10720 - RNA, 19 nt, artificial
  Oligomer
guccuggccaucauguaug

SEQ ID NO: 10721 - RNA, 19 nt, artificial
  Oligomer
gguccuggccaucauguau

SEQ ID NO: 10722 - RNA, 19 nt, artificial
  Oligomer
gaaguucuauuggugguuc

SEQ ID NO: 10723 - RNA, 19 nt, artificial
  Oligomer
ccuuccugcgagagacuuu

SEQ ID NO: 10724 - RNA, 19 nt, artificial
  Oligomer
cucauaaccuuccugcgag

SEQ ID NO: 10725 - RNA, 19 nt, artificial
  Oligomer
cgcaaccucauaaccuucc

SEQ ID NO: 10726 - RNA, 19 nt, artificial
  Oligomer
ccgcaaccucauaaccuuc

SEQ ID NO: 10727 - RNA, 19 nt, artificial
  Oligomer
cuccuucauguucucuuau

SEQ ID NO: 10728 - RNA, 19 nt, artificial
  Oligomer
gcuuacuacuauggcuuug

SEQ ID NO: 10729 - RNA, 19 nt, artificial
  Oligomer
ugcuuacuacuauggcuuu

SEQ ID NO: 10730 - RNA, 19 nt, artificial
  Oligomer
cgugcuuacuacuauggcu

SEQ ID NO: 10731 - RNA, 19 nt, artificial
  Oligomer
gaagagguuuggcaaaaag

SEQ ID NO: 10732 - RNA, 19 nt, artificial
  Oligomer
agguggaaaugguauuaga

SEQ ID NO: 10733 - RNA, 19 nt, artificial
  Oligomer
gagguggaaaugguauuag

SEQ ID NO: 10734 - RNA, 19 nt, artificial
  Oligomer
guaugaccuggaugagaau

SEQ ID NO: 10735 - RNA, 19 nt, artificial
  Oligomer
ucccgucuaauguuuacca

SEQ ID NO: 10736 - RNA, 19 nt, artificial
  Oligomer
uggcugacaaggauggcaa

SEQ ID NO: 10737 - RNA, 19 nt, artificial
  Oligomer
aacacaagaagcuacaaaa

SEQ ID NO: 10738 - RNA, 19 nt, artificial
  Oligomer
agaacacaagaagcuacaa

SEQ ID NO: 10739 - RNA, 19 nt, artificial
  Oligomer
gccgagaacacaagaagcu

SEQ ID NO: 10740 - RNA, 19 nt, artificial
  Oligomer
auugaagacauccgaaaua

SEQ ID NO: 10741 - RNA, 19 nt, artificial
  Oligomer
ccuguucagugccauuguc

SEQ ID NO: 10742 - RNA, 19 nt, artificial
  Oligomer
ggacaacauagugguugaa

SEQ ID NO: 10743 - RNA, 19 nt, artificial
  Oligomer
gcaagaaguagagcacaga

SEQ ID NO: 10744 - RNA, 19 nt, artificial
  Oligomer
ggcaagaaguagagcacag

SEQ ID NO: 10745 - RNA, 19 nt, artificial
  Oligomer
ccaaucugaacaguaccca

SEQ ID NO: 10746 - RNA, 19 nt, artificial
  Oligomer
gguuuucaaagcucccaag

SEQ ID NO: 10747 - RNA, 19 nt, artificial
  Oligomer
acaaggguuuucaaagcuc

SEQ ID NO: 10748 - RNA, 19 nt, artificial
  Oligomer
agaaaugccagcugucauu

SEQ ID NO: 10749 - RNA, 19 nt, artificial
  Oligomer
uggugucuacaugagaaau

SEQ ID NO: 10750 - RNA, 19 nt, artificial
  Oligomer
gucaagacauagaauguuu

SEQ ID NO: 10751 - RNA, 19 nt, artificial
  Oligomer
ggucaagacauagaauguu

SEQ ID NO: 10752 - RNA, 19 nt, artificial
  Oligomer
ccauacucagcucuuuaac

SEQ ID NO: 10753 - RNA, 19 nt, artificial
  Oligomer
ugagggugaaggcaagaag

SEQ ID NO: 10754 - RNA, 19 nt, artificial
  Oligomer
gggcaccaggaaacaaaga

SEQ ID NO: 10755 - RNA, 19 nt, artificial
  Oligomer
gugagggugaaggcaagaa

SEQ ID NO: 10756 - RNA, 19 nt, artificial
  Oligomer
ggacugacauuugagggag

SEQ ID NO: 10757 - RNA, 19 nt, artificial
  Oligomer
caaguguggaggugaaaag

SEQ ID NO: 10758 - RNA, 19 nt, artificial
  Oligomer
gacaaguguggaggugaaa

SEQ ID NO: 10759 - RNA, 19 nt, artificial
  Oligomer
agaaaaggcaggagacuau

SEQ ID NO: 10760 - RNA, 19 nt, artificial
  Oligomer
cuccaucagaauccaccuu

SEQ ID NO: 10761 - RNA, 19 nt, artificial
  Oligomer
acauuuaugucacccagcu

SEQ ID NO: 10762 - RNA, 19 nt, artificial
  Oligomer
uggucuucaagucauccuu

SEQ ID NO: 10763 - RNA, 19 nt, artificial
  Oligomer
cuggaagagugagggugaa

SEQ ID NO: 10764 - RNA, 19 nt, artificial
  Oligomer
ucaucuauggaggugacaa

SEQ ID NO: 10765 - RNA, 19 nt, artificial
  Oligomer
ugacccaccaccucuacau

SEQ ID NO: 10766 - RNA, 19 nt, artificial
  Oligomer
ccauguucuuuccgacgug

SEQ ID NO: 10767 - RNA, 19 nt, artificial
  Oligomer
caaccgcuaugugccuuuu

SEQ ID NO: 10768 - RNA, 19 nt, artificial
  Oligomer
gacuuuccucaaccgcuau

SEQ ID NO: 10769 - RNA, 19 nt, artificial
  Oligomer
caaccucauaaccuuccug

SEQ ID NO: 10770 - RNA, 19 nt, artificial
  Oligomer
ucuccuucauguucucuua

SEQ ID NO: 10771 - RNA, 19 nt, artificial
  Oligomer
gucuccuucauguucucuu

SEQ ID NO: 10772 - RNA, 19 nt, artificial
  Oligomer
ccagcgucuccuucauguu

SEQ ID NO: 10773 - RNA, 19 nt, artificial
  Oligomer
caugggaggauuuucacuu

SEQ ID NO: 10774 - RNA, 19 nt, artificial
  Oligomer
agcugacaugggaggauuu

SEQ ID NO: 10775 - RNA, 19 nt, artificial
  Oligomer
gcuaugacggcugguuuaa

SEQ ID NO: 10776 - RNA, 19 nt, artificial
  Oligomer
gucccaucaucauccagcu

SEQ ID NO: 10777 - RNA, 19 nt, artificial
  Oligomer
caaaagaaacucaaagaga

SEQ ID NO: 10778 - RNA, 19 nt, artificial
  Oligomer
acacaagaagcuacaaaag

SEQ ID NO: 10779 - RNA, 19 nt, artificial
  Oligomer
gagaacacaagaagcuaca

SEQ ID NO: 10780 - RNA, 19 nt, artificial
  Oligomer
ccgagaacacaagaagcua

SEQ ID NO: 10781 - RNA, 19 nt, artificial
  Oligomer
gacugugcuugacuucuuu

SEQ ID NO: 10782 - RNA, 19 nt, artificial
  Oligomer
caaugucuuugucuggcau

SEQ ID NO: 10783 - RNA, 19 nt, artificial
  Oligomer
cccuguucagugccauugu

SEQ ID NO: 10784 - RNA, 19 nt, artificial
  Oligomer
cuaaaaagcugagcuguaa

SEQ ID NO: 10785 - RNA, 19 nt, artificial
  Oligomer
ugcaucuacuggagugguc

SEQ ID NO: 10786 - RNA, 19 nt, artificial
  Oligomer
ccucucugcaucuacugga

SEQ ID NO: 10787 - RNA, 19 nt, artificial
  Oligomer
ugcguugcuuugguauuug

SEQ ID NO: 10788 - RNA, 19 nt, artificial
  Oligomer
guggaggugaaaagguaca

SEQ ID NO: 10789 - RNA, 19 nt, artificial
  Oligomer
acaaguguggaggugaaaa

SEQ ID NO: 10790 - RNA, 19 nt, artificial
  Oligomer
ugcaugaugauuauaaguc

SEQ ID NO: 10791 - RNA, 19 nt, artificial
  Oligomer
agugcaugaugauuauaag

SEQ ID NO: 10792 - RNA, 19 nt, artificial
  Oligomer
caaaugagaaaaggcagga

SEQ ID NO: 10793 - RNA, 19 nt, artificial
  Oligomer
ugccuucucuucugugcac

SEQ ID NO: 10794 - RNA, 19 nt, artificial
  Oligomer
ccacuaugagaacuucuga

SEQ ID NO: 10795 - RNA, 19 nt, artificial
  Oligomer
agaauguagagaaggccug

SEQ ID NO: 10796 - RNA, 19 nt, artificial
  Oligomer
acaucgcuguguaugagug

SEQ ID NO: 10797 - RNA, 19 nt, artificial
  Oligomer
guggcauaaauuugaggug

SEQ ID NO: 10798 - RNA, 19 nt, artificial
  Oligomer
gagugaccuaccugcaauu

SEQ ID NO: 10799 - RNA, 19 nt, artificial
  Oligomer
ccucuacauccugcucuau

SEQ ID NO: 10800 - RNA, 19 nt, artificial
  Oligomer
gccaucauguaugucuucg

SEQ ID NO: 10801 - RNA, 19 nt, artificial
  Oligomer
agguaugacaggugugcuu

SEQ ID NO: 10802 - RNA, 19 nt, artificial
  Oligomer
cagaaguucuauugguggu

SEQ ID NO: 10803 - RNA, 19 nt, artificial
  Oligomer
ucuuauaucuugcucacca

SEQ ID NO: 10804 - RNA, 19 nt, artificial
  Oligomer
cagaucgugcuuacuacua

SEQ ID NO: 10805 - RNA, 19 nt, artificial
  Oligomer
gcaaucuucucggccaucu

SEQ ID NO: 10806 - RNA, 19 nt, artificial
  Oligomer
aggcgcugcaagagaagau

SEQ ID NO: 10807 - RNA, 19 nt, artificial
  Oligomer
cagagagaaaggugagagu

SEQ ID NO: 10808 - RNA, 19 nt, artificial
  Oligomer
uguucucucuggcugacaa

SEQ ID NO: 10809 - RNA, 19 nt, artificial
  Oligomer
acauguuuguggaguccau

SEQ ID NO: 10810 - RNA, 19 nt, artificial
  Oligomer
cugcuguuuaguucugaag

SEQ ID NO: 10811 - RNA, 19 nt, artificial
  Oligomer
gaaggcaagaaguagagca

SEQ ID NO: 10812 - RNA, 19 nt, artificial
  Oligomer
agggugaaggcaagaagua

SEQ ID NO: 10813 - RNA, 19 nt, artificial
  Oligomer
ccuagaagcaaccacugau

SEQ ID NO: 10814 - RNA, 19 nt, artificial
  Oligomer
aagcugagcuguaaaauau

SEQ ID NO: 10815 - RNA, 19 nt, artificial
  Oligomer
cugauauucuugaugucac

SEQ ID NO: 10816 - RNA, 19 nt, artificial
  Oligomer
agcccugauauucuugaug

SEQ ID NO: 10817 - RNA, 19 nt, artificial
  Oligomer
cugugaugcuuagaaccug

SEQ ID NO: 10818 - RNA, 19 nt, artificial
  Oligomer
augcguugcuuugguauuu

SEQ ID NO: 10819 - RNA, 19 nt, artificial
  Oligomer
caggagacuauguucuaca

SEQ ID NO: 10820 - RNA, 19 nt, artificial
  Oligomer
ucgcuguguaugaguggcu

SEQ ID NO: 10821 - RNA, 19 nt, artificial
  Oligomer
ucauguaugucuucgccuc

SEQ ID NO: 10822 - RNA, 19 nt, artificial
  Oligomer
cagucaaugucuacaucuu

SEQ ID NO: 10823 - RNA, 19 nt, artificial
  Oligomer
acgguguguaucaggcucu

SEQ ID NO: 10824 - RNA, 19 nt, artificial
  Oligomer
acaagcgcuucguggagaa

SEQ ID NO: 10825 - RNA, 19 nt, artificial
  Oligomer
caagagaagaugcagcgag

SEQ ID NO: 10826 - RNA, 19 nt, artificial
  Oligomer
ggacugaagaagagguuug

SEQ ID NO: 10827 - RNA, 19 nt, artificial
  Oligomer
accuggugcugcuguuuag

SEQ ID NO: 10828 - RNA, 19 nt, artificial
  Oligomer
ugaccuggugcugcuguuu

SEQ ID NO: 10829 - RNA, 19 nt, artificial
  Oligomer
ucaccaucauugcucucug

SEQ ID NO: 10830 - RNA, 19 nt, artificial
  Oligomer
gccaucaccaucauugcuc

SEQ ID NO: 10831 - RNA, 19 nt, artificial
  Oligomer
gucuuugucuggcauaaag

SEQ ID NO: 10832 - RNA, 19 nt, artificial
  Oligomer
agcccaaugucuuugucug

SEQ ID NO: 10833 - RNA, 19 nt, artificial
  Oligomer
gcaaauucucccguacaga

SEQ ID NO: 10834 - RNA, 19 nt, artificial
  Oligomer
caagaaguagagcacagaa

SEQ ID NO: 10835 - RNA, 19 nt, artificial
  Oligomer
caggucaagacauagaaug

SEQ ID NO: 10836 - RNA, 19 nt, artificial
  Oligomer
agcugagcuguaaaauauu

SEQ ID NO: 10837 - RNA, 19 nt, artificial
  Oligomer
ccuaaaaagcugagcugua

SEQ ID NO: 10838 - RNA, 19 nt, artificial
  Oligomer
cuccauacucagcucuuua

SEQ ID NO: 10839 - RNA, 19 nt, artificial
  Oligomer
ugcuuggacugacauuuga

SEQ ID NO: 10840 - RNA, 19 nt, artificial
  Oligomer
gcuuugguauuugcuugga

SEQ ID NO: 10841 - RNA, 19 nt, artificial
  Oligomer
aaaagguacaauagugcuu

SEQ ID NO: 10842 - RNA, 19 nt, artificial
  Oligomer
accacuaugagaacuucug

SEQ ID NO: 10843 - RNA, 19 nt, artificial
  Oligomer
ccuucuucaacucccugca

SEQ ID NO: 10844 - RNA, 19 nt, artificial
  Oligomer
cuggucuucaagucauccu

SEQ ID NO: 10845 - RNA, 19 nt, artificial
  Oligomer
ugaccuaccugcaauucca

SEQ ID NO: 10846 - RNA, 19 nt, artificial
  Oligomer
ucucuuauaucuugcucac

SEQ ID NO: 10847 - RNA, 19 nt, artificial
  Oligomer
ucguguguguggcaaucuu

SEQ ID NO: 10848 - RNA, 19 nt, artificial
  Oligomer
aagaagagguuuggcaaaa

SEQ ID NO: 10849 - RNA, 19 nt, artificial
  Oligomer
gaagaagagguuuggcaaa

SEQ ID NO: 10850 - RNA, 19 nt, artificial
  Oligomer
cugugucaaagguggaggu

SEQ ID NO: 10851 - RNA, 19 nt, artificial
  Oligomer
cugguggucuucaugaaag

SEQ ID NO: 10852 - RNA, 19 nt, artificial
  Oligomer
cuggugcugcuguuuaguu

SEQ ID NO: 10853 - RNA, 19 nt, artificial
  Oligomer
guuuugccaucaccaucau

SEQ ID NO: 10854 - RNA, 19 nt, artificial
  Oligomer
ugcagcccaaugucuuugu

SEQ ID NO: 10855 - RNA, 19 nt, artificial
  Oligomer
agauuucggaguuggagga

SEQ ID NO: 10856 - RNA, 19 nt, artificial
  Oligomer
cccaaucugaacaguaccc

SEQ ID NO: 10857 - RNA, 19 nt, artificial
  Oligomer
cuagaagcaaccacugaug

SEQ ID NO: 10858 - RNA, 19 nt, artificial
  Oligomer
ucaagacauagaauguuuc

SEQ ID NO: 10859 - RNA, 19 nt, artificial
  Oligomer
gugaugcuuagaaccugga

SEQ ID NO: 10860 - RNA, 19 nt, artificial
  Oligomer
cacuaugagaacuucugag

SEQ ID NO: 10861 - RNA, 19 nt, artificial
  Oligomer
cuauggaggugacaagcug

SEQ ID NO: 10862 - RNA, 19 nt, artificial
  Oligomer
caccucuacauccugcucu

SEQ ID NO: 10863 - RNA, 19 nt, artificial
  Oligomer
accauguucuuuccgacgu

SEQ ID NO: 10864 - RNA, 19 nt, artificial
  Oligomer
agagaaaggugagagugca

SEQ ID NO: 10865 - RNA, 19 nt, artificial
  Oligomer
acaucguguguguggcaau

SEQ ID NO: 10866 - RNA, 19 nt, artificial
  Oligomer
gagucuauguuccgggagu

SEQ ID NO: 10867 - RNA, 19 nt, artificial
  Oligomer
guggucuucaugaaaggcu

SEQ ID NO: 10868 - RNA, 19 nt, artificial
  Oligomer
uguuuguggaguccauguu

SEQ ID NO: 10869 - RNA, 19 nt, artificial
  Oligomer
cagacaccuuuuugcucag

SEQ ID NO: 10870 - RNA, 19 nt, artificial
  Oligomer
ucagacaccuuuuugcuca

SEQ ID NO: 10871 - RNA, 19 nt, artificial
  Oligomer
gccuucccuuagugagucu

SEQ ID NO: 10872 - RNA, 19 nt, artificial
  Oligomer
cugugcuugacuucuuuga

SEQ ID NO: 10873 - RNA, 19 nt, artificial
  Oligomer
cucccguacagacuaugug

SEQ ID NO: 10874 - RNA, 19 nt, artificial
  Oligomer
ccagauuucggaguuggag

SEQ ID NO: 10875 - RNA, 19 nt, artificial
  Oligomer
gagaaaugccagcugucau

SEQ ID NO: 10876 - RNA, 19 nt, artificial
  Oligomer
aaaaagcugagcuguaaaa

SEQ ID NO: 10877 - RNA, 19 nt, artificial
  Oligomer
cuugaugucaccagugaua

SEQ ID NO: 10878 - RNA, 19 nt, artificial
  Oligomer
ccugauauucuugauguca

SEQ ID NO: 10879 - RNA, 19 nt, artificial
  Oligomer
uggacugacauuugaggga

SEQ ID NO: 10880 - RNA, 19 nt, artificial
  Oligomer
guauuugcuuggacugaca

SEQ ID NO: 10881 - RNA, 19 nt, artificial
  Oligomer
aaguccaccuguuuaucaa

SEQ ID NO: 10882 - RNA, 19 nt, artificial
  Oligomer
agagugagggugaaggcaa

SEQ ID NO: 10883 - RNA, 19 nt, artificial
  Oligomer
ugauuauaaguccaccugu

SEQ ID NO: 10884 - RNA, 19 nt, artificial
  Oligomer
cuucucuucugugcaccua

SEQ ID NO: 10885 - RNA, 19 nt, artificial
  Oligomer
agcccuucuucaacucccu

SEQ ID NO: 10886 - RNA, 19 nt, artificial
  Oligomer
agaaagugcugaaccggag

SEQ ID NO: 10887 - RNA, 19 nt, artificial
  Oligomer
ccuuugccuccauccucaa

SEQ ID NO: 10888 - RNA, 19 nt, artificial
  Oligomer
ccuugauggaccguuugga

SEQ ID NO: 10889 - RNA, 19 nt, artificial
  Oligomer
cuaccauguucuuuccgac

SEQ ID NO: 10890 - RNA, 19 nt, artificial
  Oligomer
gcuaccauguucuuuccga

SEQ ID NO: 10891 - RNA, 19 nt, artificial
  Oligomer
uugugaaugauggguccaa

SEQ ID NO: 10892 - RNA, 19 nt, artificial
  Oligomer
guguguaucaggcucugga

SEQ ID NO: 10893 - RNA, 19 nt, artificial
  Oligomer
gcugucgagucucguucau

SEQ ID NO: 10894 - RNA, 19 nt, artificial
  Oligomer
uggucuucaugaaaggcuc

SEQ ID NO: 10895 - RNA, 19 nt, artificial
  Oligomer
ccaggacauguuuguggag

SEQ ID NO: 10896 - RNA, 19 nt, artificial
  Oligomer
uggugcugcuguuuaguuc

SEQ ID NO: 10897 - RNA, 19 nt, artificial
  Oligomer
ucauugcucucugcugccu

SEQ ID NO: 10898 - RNA, 19 nt, artificial
  Oligomer
ugucuuugucuggcauaaa

SEQ ID NO: 10899 - RNA, 19 nt, artificial
  Oligomer
augucuuugucuggcauaa

SEQ ID NO: 10900 - RNA, 19 nt, artificial
  Oligomer
ccugcagcccaaugucuuu

SEQ ID NO: 10901 - RNA, 19 nt, artificial
  Oligomer
aggaggugaaugagcugcu

SEQ ID NO: 10902 - RNA, 19 nt, artificial
  Oligomer
cagcugucauuuccggaag

SEQ ID NO: 10903 - RNA, 19 nt, artificial
  Oligomer
ucgggcucuuuccuaaaaa

SEQ ID NO: 10904 - RNA, 19 nt, artificial
  Oligomer
gguauuugcuuggacugac

SEQ ID NO: 10905 - RNA, 19 nt, artificial
  Oligomer
aaaggcaggagacuauguu

SEQ ID NO: 10906 - RNA, 19 nt, artificial
  Oligomer
ggagaauauugacccagac

SEQ ID NO: 10907 - RNA, 19 nt, artificial
  Oligomer
ugaagaagagguuuggcaa

SEQ ID NO: 10908 - RNA, 19 nt, artificial
  Oligomer
cugaagaagagguuuggca

SEQ ID NO: 10909 - RNA, 19 nt, artificial
  Oligomer
ggagcucuucugacuggau

SEQ ID NO: 10910 - RNA, 19 nt, artificial
  Oligomer
caggacauguuuguggagu

SEQ ID NO: 10911 - RNA, 19 nt, artificial
  Oligomer
ggaauuugugguggccucu

SEQ ID NO: 10912 - RNA, 19 nt, artificial
  Oligomer
aggcaggagacuauguucu

SEQ ID NO: 10913 - RNA, 19 nt, artificial
  Oligomer
gagaacuucugagccuguc

SEQ ID NO: 10914 - RNA, 19 nt, artificial
  Oligomer
uggagaucagcguggugaa

SEQ ID NO: 10915 - RNA, 19 nt, artificial
  Oligomer
acauugcacagaccacccu

SEQ ID NO: 10916 - RNA, 19 nt, artificial
  Oligomer
uggagguggagguggaaau

SEQ ID NO: 10917 - RNA, 19 nt, artificial
  Oligomer
cggaguuggaggacaacau

SEQ ID NO: 10918 - RNA, 19 nt, artificial
  Oligomer
uccacaaaaucgaugcguu

SEQ ID NO: 10919 - RNA, 19 nt, artificial
  Oligomer
gggagaauauugacccaga

SEQ ID NO: 10920 - RNA, 19 nt, artificial
  Oligomer
ccaggaaugaccaagaaug

SEQ ID NO: 10921 - RNA, 19 nt, artificial
  Oligomer
ucguucaucacucggacac

SEQ ID NO: 10922 - RNA, 19 nt, artificial
  Oligomer
gguggagguggaaauggua

SEQ ID NO: 10923 - RNA, 19 nt, artificial
  Oligomer
gcaauggcuaccuguccuu

SEQ ID NO: 10924 - RNA, 19 nt, artificial
  Oligomer
aggaaagaagacaucugaa

SEQ ID NO: 10925 - RNA, 19 nt, artificial
  Oligomer
cuggagugguggccuauuu

SEQ ID NO: 10926 - RNA, 19 nt, artificial
  Oligomer
agaggaaagaagacaucug

SEQ ID NO: 10927 - RNA, 19 nt, artificial
  Oligomer
ggaacuggagugaucucaa

SEQ ID NO: 10928 - RNA, 19 nt, artificial
  Oligomer
ggaguuggaggacaacaua

SEQ ID NO: 10929 - RNA, 19 nt, artificial
  Oligomer
ccagugcagaagcugugau

SEQ ID NO: 10930 - RNA, 19 nt, artificial
  Oligomer
ccagucaggaucucccaaa

SEQ ID NO: 10931 - RNA, 19 nt, artificial
  Oligomer
gcacauuuaugucacccag

SEQ ID NO: 10932 - RNA, 19 nt, artificial
  Oligomer
ggcagccaaaugcugugua

SEQ ID NO: 10933 - RNA, 19 nt, artificial
  Oligomer
gaguacaagucaggacagu

SEQ ID NO: 10934 - RNA, 19 nt, artificial
  Oligomer
cccaaggcuuugaguacaa

SEQ ID NO: 10935 - RNA, 19 nt, artificial
  Oligomer
cgcagucaaugucuacauc

SEQ ID NO: 10936 - RNA, 19 nt, artificial
  Oligomer
acgcagucaaugucuacau

SEQ ID NO: 10937 - RNA, 19 nt, artificial
  Oligomer
agguggagguggaaauggu

SEQ ID NO: 10938 - RNA, 19 nt, artificial
  Oligomer
ugccuucccuuagugaguc

SEQ ID NO: 10939 - RNA, 19 nt, artificial
  Oligomer
ccaguuuugguccuacuaa

SEQ ID NO: 10940 - RNA, 19 nt, artificial
  Oligomer
aucgggcucuuuccuaaaa

SEQ ID NO: 10941 - RNA, 19 nt, artificial
  Oligomer
cucugccagauauucagua

SEQ ID NO: 10942 - RNA, 19 nt, artificial
  Oligomer
aaaaggagcagcccuacuu

SEQ ID NO: 10943 - RNA, 19 nt, artificial
  Oligomer
ggaguauacaggauaccgu

SEQ ID NO: 10944 - RNA, 19 nt, artificial
  Oligomer
gcagucaaugucuacaucu

SEQ ID NO: 10945 - RNA, 19 nt, artificial
  Oligomer
gcagcucugugucaaaggu

SEQ ID NO: 10946 - RNA, 19 nt, artificial
  Oligomer
cuucuucagacaccuuuuu

SEQ ID NO: 10947 - RNA, 19 nt, artificial
  Oligomer
cugcugcucaagaucccua

SEQ ID NO: 10948 - RNA, 19 nt, artificial
  Oligomer
ggucgcuguuaucaacauu

SEQ ID NO: 10949 - RNA, 19 nt, artificial
  Oligomer
uccggaagguccugaacaa

SEQ ID NO: 10950 - RNA, 19 nt, artificial
  Oligomer
ggugaaggcaagaaguaga

SEQ ID NO: 10951 - RNA, 19 nt, artificial
  Oligomer
caaauccaguuuugguccu

SEQ ID NO: 10952 - RNA, 19 nt, artificial
  Oligomer
ugaugugauuucuaccaaa

SEQ ID NO: 10953 - RNA, 19 nt, artificial
  Oligomer
guacauguuuuaccaccac

SEQ ID NO: 10954 - RNA, 19 nt, artificial
  Oligomer
ucagcucuuuaacuuuucu

SEQ ID NO: 10955 - RNA, 19 nt, artificial
  Oligomer
ggaucucccaaagaagaua

SEQ ID NO: 10956 - RNA, 19 nt, artificial
  Oligomer
cccggaguauacaggauac

SEQ ID NO: 10957 - RNA, 19 nt, artificial
  Oligomer
caauugcagugcaugauga

SEQ ID NO: 10958 - RNA, 19 nt, artificial
  Oligomer
uacaauugcagugcaugau

SEQ ID NO: 10959 - RNA, 19 nt, artificial
  Oligomer
uucuacaauugcagugcau

SEQ ID NO: 10960 - RNA, 19 nt, artificial
  Oligomer
agaaaacacucccggagua

SEQ ID NO: 10961 - RNA, 19 nt, artificial
  Oligomer
accagaacaucgcugugua

SEQ ID NO: 10962 - RNA, 19 nt, artificial
  Oligomer
ccgcuaugugccuuuugau

SEQ ID NO: 10963 - RNA, 19 nt, artificial
  Oligomer
ccaaaagcugcagcaguac

SEQ ID NO: 10964 - RNA, 19 nt, artificial
  Oligomer
gagcucuucugacuggauc

SEQ ID NO: 10965 - RNA, 19 nt, artificial
  Oligomer
cucaggugcuggacaucaa

SEQ ID NO: 10966 - RNA, 19 nt, artificial
  Oligomer
ugagcgagaaggagcuauu

SEQ ID NO: 10967 - RNA, 19 nt, artificial
  Oligomer
ccaucaccaucauugcucu

SEQ ID NO: 10968 - RNA, 19 nt, artificial
  Oligomer
acgugcuggucgcuguuau

SEQ ID NO: 10969 - RNA, 19 nt, artificial
  Oligomer
cgcuacugguuugagaaca

SEQ ID NO: 10970 - RNA, 19 nt, artificial
  Oligomer
aggacaacauagugguuga

SEQ ID NO: 10971 - RNA, 19 nt, artificial
  Oligomer
gugaaggcaagaaguagag

SEQ ID NO: 10972 - RNA, 19 nt, artificial
  Oligomer
agguccugaacaaggguuu

SEQ ID NO: 10973 - RNA, 19 nt, artificial
  Oligomer
aaauccaguuuugguccua

SEQ ID NO: 10974 - RNA, 19 nt, artificial
  Oligomer
cgggcucuuuccuaaaaag

SEQ ID NO: 10975 - RNA, 19 nt, artificial
  Oligomer
cagucaggaucucccaaag

SEQ ID NO: 10976 - RNA, 19 nt, artificial
  Oligomer
ccaauauugggagaauauu

SEQ ID NO: 10977 - RNA, 19 nt, artificial
  Oligomer
cccaauauugggagaauau

SEQ ID NO: 10978 - RNA, 19 nt, artificial
  Oligomer
gcuuccaguauccugccuu

SEQ ID NO: 10979 - RNA, 19 nt, artificial
  Oligomer
ccaccaugcuauacaucug

SEQ ID NO: 10980 - RNA, 19 nt, artificial
  Oligomer
gcagccaaaugcuguguaa

SEQ ID NO: 10981 - RNA, 19 nt, artificial
  Oligomer
ucaaccgcuaugugccuuu

SEQ ID NO: 10982 - RNA, 19 nt, artificial
  Oligomer
gcgucuccuucauguucuc

SEQ ID NO: 10983 - RNA, 19 nt, artificial
  Oligomer
cuggacugaagaagagguu

SEQ ID NO: 10984 - RNA, 19 nt, artificial
  Oligomer
aggugguggagucuauguu

SEQ ID NO: 10985 - RNA, 19 nt, artificial
  Oligomer
ggaugagaauggcuuccuc

SEQ ID NO: 10986 - RNA, 19 nt, artificial
  Oligomer
uaccauguaugaccuggau

SEQ ID NO: 10987 - RNA, 19 nt, artificial
  Oligomer
ugcagcaggucaaccucau

SEQ ID NO: 10988 - RNA, 19 nt, artificial
  Oligomer
agcuacaaaagaaacucaa

SEQ ID NO: 10989 - RNA, 19 nt, artificial
  Oligomer
gagucugcuucucucugga

SEQ ID NO: 10990 - RNA, 19 nt, artificial
  Oligomer
ccucaaccuaagcagcuca

SEQ ID NO: 10991 - RNA, 19 nt, artificial
  Oligomer
gguuugagaacaccaggaa

SEQ ID NO: 10992 - RNA, 19 nt, artificial
  Oligomer
ccuggcaaauucucccgua

SEQ ID NO: 10993 - RNA, 19 nt, artificial
  Oligomer
ggguuuucaaagcucccaa

SEQ ID NO: 10994 - RNA, 19 nt, artificial
  Oligomer
gaugugauuucuaccaaau

SEQ ID NO: 10995 - RNA, 19 nt, artificial
  Oligomer
cccaggucaagacauagaa

SEQ ID NO: 10996 - RNA, 19 nt, artificial
  Oligomer
cagcucuuuaacuuuucuu

SEQ ID NO: 10997 - RNA, 19 nt, artificial
  Oligomer
cucagcucuuuaacuuuuc

SEQ ID NO: 10998 - RNA, 19 nt, artificial
  Oligomer
acucagcucuuuaacuuuu

SEQ ID NO: 10999 - RNA, 19 nt, artificial
  Oligomer
gaagcugugaugcuuagaa

SEQ ID NO: 11000 - RNA, 19 nt, artificial
  Oligomer
cccagcuuccugcagaaaa

SEQ ID NO: 11001 - RNA, 19 nt, artificial
  Oligomer
cucaggaccaccaugcuau

SEQ ID NO: 11002 - RNA, 19 nt, artificial
  Oligomer
uggugucugugcacauuua

SEQ ID NO: 11003 - RNA, 19 nt, artificial
  Oligomer
ccagaacaucgcuguguau

SEQ ID NO: 11004 - RNA, 19 nt, artificial
  Oligomer
ucaggaguggcauaaauuu

SEQ ID NO: 11005 - RNA, 19 nt, artificial
  Oligomer
ccacaucuacuuccugguc

SEQ ID NO: 11006 - RNA, 19 nt, artificial
  Oligomer
gcagcuaugcucugaucca

SEQ ID NO: 11007 - RNA, 19 nt, artificial
  Oligomer
accgcuaugugccuuuuga

SEQ ID NO: 11008 - RNA, 19 nt, artificial
  Oligomer
gaggcuuccuagcccaaaa

SEQ ID NO: 11009 - RNA, 19 nt, artificial
  Oligomer
acaaggaggagcugacaug

SEQ ID NO: 11010 - RNA, 19 nt, artificial
  Oligomer
ccaacaacugccuguccaa

SEQ ID NO: 11011 - RNA, 19 nt, artificial
  Oligomer
agaauggcuuccucuccaa

SEQ ID NO: 11012 - RNA, 19 nt, artificial
  Oligomer
ccugguggucuucaugaaa

SEQ ID NO: 11013 - RNA, 19 nt, artificial
  Oligomer
ugcucaagaucccuaagga

SEQ ID NO: 11014 - RNA, 19 nt, artificial
  Oligomer
cuguccaacaaccgaggau

SEQ ID NO: 11015 - RNA, 19 nt, artificial
  Oligomer
caaccuaagcagcucacaa

SEQ ID NO: 11016 - RNA, 19 nt, artificial
  Oligomer
cucaaccuaagcagcucac

SEQ ID NO: 11017 - RNA, 19 nt, artificial
  Oligomer
agagcacagaagcaaagau

SEQ ID NO: 11018 - RNA, 19 nt, artificial
  Oligomer
acaacauagugguugaaga

SEQ ID NO: 11019 - RNA, 19 nt, artificial
  Oligomer
gaggacaacauagugguug

SEQ ID NO: 11020 - RNA, 19 nt, artificial
  Oligomer
guccugaacaaggguuuuc

SEQ ID NO: 11021 - RNA, 19 nt, artificial
  Oligomer
gguccugaacaaggguuuu

SEQ ID NO: 11022 - RNA, 19 nt, artificial
  Oligomer
gucuacaugagaaaugcca

SEQ ID NO: 11023 - RNA, 19 nt, artificial
  Oligomer
gcaccaggaaacaaagaug

SEQ ID NO: 11024 - RNA, 19 nt, artificial
  Oligomer
cagaagcugugaugcuuag

SEQ ID NO: 11025 - RNA, 19 nt, artificial
  Oligomer
gcagaagcugugaugcuua

SEQ ID NO: 11026 - RNA, 19 nt, artificial
  Oligomer
ccggaguauacaggauacc

SEQ ID NO: 11027 - RNA, 19 nt, artificial
  Oligomer
ucccggaguauacaggaua

SEQ ID NO: 11028 - RNA, 19 nt, artificial
  Oligomer
guucuacaauugcagugca

SEQ ID NO: 11029 - RNA, 19 nt, artificial
  Oligomer
ucccaauauugggagaaua

SEQ ID NO: 11030 - RNA, 19 nt, artificial
  Oligomer
cuccaggaaugaccaagaa

SEQ ID NO: 11031 - RNA, 19 nt, artificial
  Oligomer
ugcacauuuaugucaccca

SEQ ID NO: 11032 - RNA, 19 nt, artificial
  Oligomer
aggaguggcauaaauuuga

SEQ ID NO: 11033 - RNA, 19 nt, artificial
  Oligomer
ccacgcagucaaugucuac

SEQ ID NO: 11034 - RNA, 19 nt, artificial
  Oligomer
gccauuuugcacagugcug

SEQ ID NO: 11035 - RNA, 19 nt, artificial
  Oligomer
ugcgagagacuuuccucaa

SEQ ID NO: 11036 - RNA, 19 nt, artificial
  Oligomer
cccaaaagcugcagcagua

SEQ ID NO: 11037 - RNA, 19 nt, artificial
  Oligomer
gcugguuuaacaaccugag

SEQ ID NO: 11038 - RNA, 19 nt, artificial
  Oligomer
ugcgauccuucaucgagau

SEQ ID NO: 11039 - RNA, 19 nt, artificial
  Oligomer
aggacgaauucuucaccau

SEQ ID NO: 11040 - RNA, 19 nt, artificial
  Oligomer
agaggauaagucccgucua

SEQ ID NO: 11041 - RNA, 19 nt, artificial
  Oligomer
auuuguauaauugucuggg

SEQ ID NO: 11042 - RNA, 19 nt, artificial
  Oligomer
uuuguauaauugucugggu

SEQ ID NO: 11043 - RNA, 19 nt, artificial
  Oligomer
uuuuguggaagucaauuag

SEQ ID NO: 11044 - RNA, 19 nt, artificial
  Oligomer
uugucugggucaauauucu

SEQ ID NO: 11045 - RNA, 19 nt, artificial
  Oligomer
gaauugagaucgaguacug

SEQ ID NO: 11046 - RNA, 19 nt, artificial
  Oligomer
aauugagaucgaguacuga

SEQ ID NO: 11047 - RNA, 19 nt, artificial
  Oligomer
auugucugggucaauauuc

SEQ ID NO: 11048 - RNA, 19 nt, artificial
  Oligomer
aaguagauguggaaagugg

SEQ ID NO: 11049 - RNA, 19 nt, artificial
  Oligomer
augaagugaaaauccuccc

SEQ ID NO: 11050 - RNA, 19 nt, artificial
  Oligomer
agccuuccuaaauagcucc

SEQ ID NO: 11051 - RNA, 19 nt, artificial
  Oligomer
aguauauuuaguaggacca

SEQ ID NO: 11052 - RNA, 19 nt, artificial
  Oligomer
uuguggaagucaauuagag

SEQ ID NO: 11053 - RNA, 19 nt, artificial
  Oligomer
uagacauugacugcguggc

SEQ ID NO: 11054 - RNA, 19 nt, artificial
  Oligomer
ugguuuagggugguguugg

SEQ ID NO: 11055 - RNA, 19 nt, artificial
  Oligomer
aaccacuauguuguccucc

SEQ ID NO: 11056 - RNA, 19 nt, artificial
  Oligomer
aagagcccgaugaaaaagg

SEQ ID NO: 11057 - RNA, 19 nt, artificial
  Oligomer
auuguaccuuuucaccucc

SEQ ID NO: 11058 - RNA, 19 nt, artificial
  Oligomer
uacaugguaaacauuagac

SEQ ID NO: 11059 - RNA, 19 nt, artificial
  Oligomer
augguaaacauuagacggg

SEQ ID NO: 11060 - RNA, 19 nt, artificial
  Oligomer
uuguuggacaggaugaggu

SEQ ID NO: 11061 - RNA, 19 nt, artificial
  Oligomer
uuggacaggaugagguuga

SEQ ID NO: 11062 - RNA, 19 nt, artificial
  Oligomer
guguuggguucagaugucu

SEQ ID NO: 11063 - RNA, 19 nt, artificial
  Oligomer
uuuaguaggaccaaaacug

SEQ ID NO: 11064 - RNA, 19 nt, artificial
  Oligomer
ucgaguacugaauaucugg

SEQ ID NO: 11065 - RNA, 19 nt, artificial
  Oligomer
aaguugcugacacuuuggg

SEQ ID NO: 11066 - RNA, 19 nt, artificial
  Oligomer
uucucuacauucuugguca

SEQ ID NO: 11067 - RNA, 19 nt, artificial
  Oligomer
aaaauggccaggacaacag

SEQ ID NO: 11068 - RNA, 19 nt, artificial
  Oligomer
aagguuaugagguugcggc

SEQ ID NO: 11069 - RNA, 19 nt, artificial
  Oligomer
auauaagagaacaugaagg

SEQ ID NO: 11070 - RNA, 19 nt, artificial
  Oligomer
caugaagugaaaauccucc

SEQ ID NO: 11071 - RNA, 19 nt, artificial
  Oligomer
aucauggugaagaauucgu

SEQ ID NO: 11072 - RNA, 19 nt, artificial
  Oligomer
gaguacugaauaucuggca

SEQ ID NO: 11073 - RNA, 19 nt, artificial
  Oligomer
aucuuuguuuccuggugcc

SEQ ID NO: 11074 - RNA, 19 nt, artificial
  Oligomer
uauuguaccuuuucaccuc

SEQ ID NO: 11075 - RNA, 19 nt, artificial
  Oligomer
auagaugauugccgggacc

SEQ ID NO: 11076 - RNA, 19 nt, artificial
  Oligomer
uauaagagaacaugaagga

SEQ ID NO: 11077 - RNA, 19 nt, artificial
  Oligomer
guuggguucagaugucuuc

SEQ ID NO: 11078 - RNA, 19 nt, artificial
  Oligomer
uggaugaugaugggacugc

SEQ ID NO: 11079 - RNA, 19 nt, artificial
  Oligomer
uuucuuuuguagcuucuug

SEQ ID NO: 11080 - RNA, 19 nt, artificial
  Oligomer
cgaguacugaauaucuggc

SEQ ID NO: 11081 - RNA, 19 nt, artificial
  Oligomer
aagcaacgcaucgauuuug

SEQ ID NO: 11082 - RNA, 19 nt, artificial
  Oligomer
auuguagaacauagucucc

SEQ ID NO: 11083 - RNA, 19 nt, artificial
  Oligomer
gacaccucaaauuuaugcc

SEQ ID NO: 11084 - RNA, 19 nt, artificial
  Oligomer
cuccauagaugauugccgg

SEQ ID NO: 11085 - RNA, 19 nt, artificial
  Oligomer
uagauguggaaagugggca

SEQ ID NO: 11086 - RNA, 19 nt, artificial
  Oligomer
ucauucacaaagacguugg

SEQ ID NO: 11087 - RNA, 19 nt, artificial
  Oligomer
aacacgccaacacagaugg

SEQ ID NO: 11088 - RNA, 19 nt, artificial
  Oligomer
cugugguuuaggguggugu

SEQ ID NO: 11089 - RNA, 19 nt, artificial
  Oligomer
ucacagccuuccuaaauag

SEQ ID NO: 11090 - RNA, 19 nt, artificial
  Oligomer
cagccuuccuaaauagcuc

SEQ ID NO: 11091 - RNA, 19 nt, artificial
  Oligomer
cuuccuaaauagcuccuuc

SEQ ID NO: 11092 - RNA, 19 nt, artificial
  Oligomer
cuaaauagcuccuucucgc

SEQ ID NO: 11093 - RNA, 19 nt, artificial
  Oligomer
aagucaagcacagucaggg

SEQ ID NO: 11094 - RNA, 19 nt, artificial
  Oligomer
guguucucaaaccaguagc

SEQ ID NO: 11095 - RNA, 19 nt, artificial
  Oligomer
aacuggucgaggacaaugg

SEQ ID NO: 11096 - RNA, 19 nt, artificial
  Oligomer
caguaguuguugcagaccc

SEQ ID NO: 11097 - RNA, 19 nt, artificial
  Oligomer
uuucucauguagacaccag

SEQ ID NO: 11098 - RNA, 19 nt, artificial
  Oligomer
uucucauguagacaccagg

SEQ ID NO: 11099 - RNA, 19 nt, artificial
  Oligomer
aguacugaauaucuggcag

SEQ ID NO: 11100 - RNA, 19 nt, artificial
  Oligomer
uuuguggaagucaauuaga

SEQ ID NO: 11101 - RNA, 19 nt, artificial
  Oligomer
uggaagucaauuagagaug

SEQ ID NO: 11102 - RNA, 19 nt, artificial
  Oligomer
uggucuuuaucuucuuugg

SEQ ID NO: 11103 - RNA, 19 nt, artificial
  Oligomer
uuauaaucaucaugcacug

SEQ ID NO: 11104 - RNA, 19 nt, artificial
  Oligomer
uauaaucaucaugcacugc

SEQ ID NO: 11105 - RNA, 19 nt, artificial
  Oligomer
gccuucucuacauucuugg

SEQ ID NO: 11106 - RNA, 19 nt, artificial
  Oligomer
uauccagcacagccauugc

SEQ ID NO: 11107 - RNA, 19 nt, artificial
  Oligomer
cuuguacucaaagccuugg

SEQ ID NO: 11108 - RNA, 19 nt, artificial
  Oligomer
caccuccauagaugauugc

SEQ ID NO: 11109 - RNA, 19 nt, artificial
  Oligomer
ugacugagaagauguagac

SEQ ID NO: 11110 - RNA, 19 nt, artificial
  Oligomer
uagcgguugaggaaagucu

SEQ ID NO: 11111 - RNA, 19 nt, artificial
  Oligomer
aggaagguuaugagguugc

SEQ ID NO: 11112 - RNA, 19 nt, artificial
  Oligomer
cauacaugguaaacauuag

SEQ ID NO: 11113 - RNA, 19 nt, artificial
  Oligomer
agcagcuggaugaugaugg

SEQ ID NO: 11114 - RNA, 19 nt, artificial
  Oligomer
uuggguucagaugucuucu

SEQ ID NO: 11115 - RNA, 19 nt, artificial
  Oligomer
cuuugaguuucuuuuguag

SEQ ID NO: 11116 - RNA, 19 nt, artificial
  Oligomer
uuugaguuucuuuuguagc

SEQ ID NO: 11117 - RNA, 19 nt, artificial
  Oligomer
cgaauccaguaguuguugc

SEQ ID NO: 11118 - RNA, 19 nt, artificial
  Oligomer
gaauccaguaguuguugca

SEQ ID NO: 11119 - RNA, 19 nt, artificial
  Oligomer
cauuucucauguagacacc

SEQ ID NO: 11120 - RNA, 19 nt, artificial
  Oligomer
agcaacgcaucgauuuugu

SEQ ID NO: 11121 - RNA, 19 nt, artificial
  Oligomer
agucaauuagagauguggg

SEQ ID NO: 11122 - RNA, 19 nt, artificial
  Oligomer
auaaucaucaugcacugca

SEQ ID NO: 11123 - RNA, 19 nt, artificial
  Oligomer
cuaagguggauucugaugg

SEQ ID NO: 11124 - RNA, 19 nt, artificial
  Oligomer
uaguggugcaugaaguggg

SEQ ID NO: 11125 - RNA, 19 nt, artificial
  Oligomer
cugacuuguacucaaagcc

SEQ ID NO: 11126 - RNA, 19 nt, artificial
  Oligomer
cauagaugauugccgggac

SEQ ID NO: 11127 - RNA, 19 nt, artificial
  Oligomer
aagacauacaugauggcca

SEQ ID NO: 11128 - RNA, 19 nt, artificial
  Oligomer
aucauucacaaagacguug

SEQ ID NO: 11129 - RNA, 19 nt, artificial
  Oligomer
aaauggccaggacaacagc

SEQ ID NO: 11130 - RNA, 19 nt, artificial
  Oligomer
auaguaguaagcacgaucu

SEQ ID NO: 11131 - RNA, 19 nt, artificial
  Oligomer
uuuuugccaaaccucuucu

SEQ ID NO: 11132 - RNA, 19 nt, artificial
  Oligomer
aucucuaauaccauuucca

SEQ ID NO: 11133 - RNA, 19 nt, artificial
  Oligomer
aauaccauuuccaccucca

SEQ ID NO: 11134 - RNA, 19 nt, artificial
  Oligomer
cagcaugaagugaaaaucc

SEQ ID NO: 11135 - RNA, 19 nt, artificial
  Oligomer
ugaaaauccucccauguca

SEQ ID NO: 11136 - RNA, 19 nt, artificial
  Oligomer
uuggcugcuuccuucuuca

SEQ ID NO: 11137 - RNA, 19 nt, artificial
  Oligomer
cucuuugaguuucuuuugu

SEQ ID NO: 11138 - RNA, 19 nt, artificial
  Oligomer
gaagcagacucacuaaggg

SEQ ID NO: 11139 - RNA, 19 nt, artificial
  Oligomer
uccucuuaaaaucuuugcu

SEQ ID NO: 11140 - RNA, 19 nt, artificial
  Oligomer
ucgaggacaauggcacuga

SEQ ID NO: 11141 - RNA, 19 nt, artificial
  Oligomer
aauccaguaguuguugcag

SEQ ID NO: 11142 - RNA, 19 nt, artificial
  Oligomer
uaguuguugcagacccuga

SEQ ID NO: 11143 - RNA, 19 nt, artificial
  Oligomer
uuguugcagacccugagag

SEQ ID NO: 11144 - RNA, 19 nt, artificial
  Oligomer
auucuaugucuugaccugg

SEQ ID NO: 11145 - RNA, 19 nt, artificial
  Oligomer
gacaucaagaauaucaggg

SEQ ID NO: 11146 - RNA, 19 nt, artificial
  Oligomer
gaagucaauuagagaugug

SEQ ID NO: 11147 - RNA, 19 nt, artificial
  Oligomer
uuguaccuuuucaccucca

SEQ ID NO: 11148 - RNA, 19 nt, artificial
  Oligomer
gucuuuaucuucuuuggga

SEQ ID NO: 11149 - RNA, 19 nt, artificial
  Oligomer
uuguagaacauagucuccu

SEQ ID NO: 11150 - RNA, 19 nt, artificial
  Oligomer
uuguauaauugucuggguc

SEQ ID NO: 11151 - RNA, 19 nt, artificial
  Oligomer
uccauagaugauugccggg

SEQ ID NO: 11152 - RNA, 19 nt, artificial
  Oligomer
guagauguggaaagugggc

SEQ ID NO: 11153 - RNA, 19 nt, artificial
  Oligomer
uagcugccauggaugauga

SEQ ID NO: 11154 - RNA, 19 nt, artificial
  Oligomer
acauacaugauggccagga

SEQ ID NO: 11155 - RNA, 19 nt, artificial
  Oligomer
aaccaccaauagaacuucu

SEQ ID NO: 11156 - RNA, 19 nt, artificial
  Oligomer
cauucacaaagacguuggg

SEQ ID NO: 11157 - RNA, 19 nt, artificial
  Oligomer
auggugagcaagauauaag

SEQ ID NO: 11158 - RNA, 19 nt, artificial
  Oligomer
aagccauaguaguaagcac

SEQ ID NO: 11159 - RNA, 19 nt, artificial
  Oligomer
agcaugaagugaaaauccu

SEQ ID NO: 11160 - RNA, 19 nt, artificial
  Oligomer
ugaagugaaaauccuccca

SEQ ID NO: 11161 - RNA, 19 nt, artificial
  Oligomer
cucucaccuuucucucugg

SEQ ID NO: 11162 - RNA, 19 nt, artificial
  Oligomer
cucuucagaacuaaacagc

SEQ ID NO: 11163 - RNA, 19 nt, artificial
  Oligomer
uggacaggaugagguugac

SEQ ID NO: 11164 - RNA, 19 nt, artificial
  Oligomer
guagcuucuuguguucucg

SEQ ID NO: 11165 - RNA, 19 nt, artificial
  Oligomer
ugccagacaaagacauugg

SEQ ID NO: 11166 - RNA, 19 nt, artificial
  Oligomer
agggugguauuucggaugu

SEQ ID NO: 11167 - RNA, 19 nt, artificial
  Oligomer
cucuuaaaaucuuugcuuc

SEQ ID NO: 11168 - RNA, 19 nt, artificial
  Oligomer
uaaaaucuuugcuucugug

SEQ ID NO: 11169 - RNA, 19 nt, artificial
  Oligomer
acauuaggguugagaucac

SEQ ID NO: 11170 - RNA, 19 nt, artificial
  Oligomer
cuguacgggagaauuugcc

SEQ ID NO: 11171 - RNA, 19 nt, artificial
  Oligomer
uucucccgaauccaguagu

SEQ ID NO: 11172 - RNA, 19 nt, artificial
  Oligomer
auccaguaguuguugcaga

SEQ ID NO: 11173 - RNA, 19 nt, artificial
  Oligomer
aguaguuguugcagacccu

SEQ ID NO: 11174 - RNA, 19 nt, artificial
  Oligomer
aguuguugcagacccugag

SEQ ID NO: 11175 - RNA, 19 nt, artificial
  Oligomer
ucucauguagacaccaggg

SEQ ID NO: 11176 - RNA, 19 nt, artificial
  Oligomer
aaauauuuuacagcucagc

SEQ ID NO: 11177 - RNA, 19 nt, artificial
  Oligomer
uuaaagagcugaguaugga

SEQ ID NO: 11178 - RNA, 19 nt, artificial
  Oligomer
uaccaaagcaacgcaucga

SEQ ID NO: 11179 - RNA, 19 nt, artificial
  Oligomer
cacuauuguaccuuuucac

SEQ ID NO: 11180 - RNA, 19 nt, artificial
  Oligomer
acuauuguaccuuuucacc

SEQ ID NO: 11181 - RNA, 19 nt, artificial
  Oligomer
uaagguggauucugaugga

SEQ ID NO: 11182 - RNA, 19 nt, artificial
  Oligomer
auaguggugcaugaagugg

SEQ ID NO: 11183 - RNA, 19 nt, artificial
  Oligomer
ucuacauucuuggucauuc

SEQ ID NO: 11184 - RNA, 19 nt, artificial
  Oligomer
cuucuuacacagcauuugg

SEQ ID NO: 11185 - RNA, 19 nt, artificial
  Oligomer
guauccagcacagccauug

SEQ ID NO: 11186 - RNA, 19 nt, artificial
  Oligomer
ucaccuccauagaugauug

SEQ ID NO: 11187 - RNA, 19 nt, artificial
  Oligomer
accuccauagaugauugcc

SEQ ID NO: 11188 - RNA, 19 nt, artificial
  Oligomer
ccuccauagaugauugccg

SEQ ID NO: 11189 - RNA, 19 nt, artificial
  Oligomer
aguagauguggaaaguggg

SEQ ID NO: 11190 - RNA, 19 nt, artificial
  Oligomer
ucucgcaggaagguuauga

SEQ ID NO: 11191 - RNA, 19 nt, artificial
  Oligomer
aaaauccucccaugucagc

SEQ ID NO: 11192 - RNA, 19 nt, artificial
  Oligomer
gugaagaauucguccuugg

SEQ ID NO: 11193 - RNA, 19 nt, artificial
  Oligomer
caugguaaacauuagacgg

SEQ ID NO: 11194 - RNA, 19 nt, artificial
  Oligomer
uuccucuucagaacuaaac

SEQ ID NO: 11195 - RNA, 19 nt, artificial
  Oligomer
uucagaacuaaacagcagc

SEQ ID NO: 11196 - RNA, 19 nt, artificial
  Oligomer
uuagggaucuugagcagca

SEQ ID NO: 11197 - RNA, 19 nt, artificial
  Oligomer
augucuucuuuccucuuaa

SEQ ID NO: 11198 - RNA, 19 nt, artificial
  Oligomer
gacaaagacauugggcugc

SEQ ID NO: 11199 - RNA, 19 nt, artificial
  Oligomer
cuuaaaaucuuugcuucug

SEQ ID NO: 11200 - RNA, 19 nt, artificial
  Oligomer
aaagagcugaguauggagg

SEQ ID NO: 11201 - RNA, 19 nt, artificial
  Oligomer
aagagcugaguauggaggg

SEQ ID NO: 11202 - RNA, 19 nt, artificial
  Oligomer
aucgaguacugaauaucug

SEQ ID NO: 11203 - RNA, 19 nt, artificial
  Oligomer
aucaagaauaucagggcug

SEQ ID NO: 11204 - RNA, 19 nt, artificial
  Oligomer
ucaagaauaucagggcugg

SEQ ID NO: 11205 - RNA, 19 nt, artificial
  Oligomer
uuuguuuccuggugcccuc

SEQ ID NO: 11206 - RNA, 19 nt, artificial
  Oligomer
auaccaaagcaacgcaucg

SEQ ID NO: 11207 - RNA, 19 nt, artificial
  Oligomer
uaccuuuucaccuccacac

SEQ ID NO: 11208 - RNA, 19 nt, artificial
  Oligomer
guggucuuuaucuucuuug

SEQ ID NO: 11209 - RNA, 19 nt, artificial
  Oligomer
ggacuuauaaucaucaugc

SEQ ID NO: 11210 - RNA, 19 nt, artificial
  Oligomer
aaguucucauaguggugca

SEQ ID NO: 11211 - RNA, 19 nt, artificial
  Oligomer
acaccucaaauuuaugcca

SEQ ID NO: 11212 - RNA, 19 nt, artificial
  Oligomer
auguucugguagguggcga

SEQ ID NO: 11213 - RNA, 19 nt, artificial
  Oligomer
cucaaauuuaugccacucc

SEQ ID NO: 11214 - RNA, 19 nt, artificial
  Oligomer
agauguggaaagugggcag

SEQ ID NO: 11215 - RNA, 19 nt, artificial
  Oligomer
augaugagcagggcauaga

SEQ ID NO: 11216 - RNA, 19 nt, artificial
  Oligomer
uagagcaggauguagaggu

SEQ ID NO: 11217 - RNA, 19 nt, artificial
  Oligomer
gcgaagacauacaugaugg

SEQ ID NO: 11218 - RNA, 19 nt, artificial
  Oligomer
gaagacauacaugauggcc

SEQ ID NO: 11219 - RNA, 19 nt, artificial
  Oligomer
agacauacaugauggccag

SEQ ID NO: 11220 - RNA, 19 nt, artificial
  Oligomer
cauacaugauggccaggac

SEQ ID NO: 11221 - RNA, 19 nt, artificial
  Oligomer
auacaugauggccaggacc

SEQ ID NO: 11222 - RNA, 19 nt, artificial
  Oligomer
gaaccaccaauagaacuuc

SEQ ID NO: 11223 - RNA, 19 nt, artificial
  Oligomer
aaagucucucgcaggaagg

SEQ ID NO: 11224 - RNA, 19 nt, artificial
  Oligomer
cucgcaggaagguuaugag

SEQ ID NO: 11225 - RNA, 19 nt, artificial
  Oligomer
ggaagguuaugagguugcg

SEQ ID NO: 11226 - RNA, 19 nt, artificial
  Oligomer
gaagguuaugagguugcgg

SEQ ID NO: 11227 - RNA, 19 nt, artificial
  Oligomer
auaagagaacaugaaggag

SEQ ID NO: 11228 - RNA, 19 nt, artificial
  Oligomer
caaagccauaguaguaagc

SEQ ID NO: 11229 - RNA, 19 nt, artificial
  Oligomer
aaagccauaguaguaagca

SEQ ID NO: 11230 - RNA, 19 nt, artificial
  Oligomer
agccauaguaguaagcacg

SEQ ID NO: 11231 - RNA, 19 nt, artificial
  Oligomer
cuuuuugccaaaccucuuc

SEQ ID NO: 11232 - RNA, 19 nt, artificial
  Oligomer
ucuaauaccauuuccaccu

SEQ ID NO: 11233 - RNA, 19 nt, artificial
  Oligomer
cuaauaccauuuccaccuc

SEQ ID NO: 11234 - RNA, 19 nt, artificial
  Oligomer
auucucauccaggucauac

SEQ ID NO: 11235 - RNA, 19 nt, artificial
  Oligomer
ugguaaacauuagacggga

SEQ ID NO: 11236 - RNA, 19 nt, artificial
  Oligomer
uugccauccuugucagcca

SEQ ID NO: 11237 - RNA, 19 nt, artificial
  Oligomer
uuuuguagcuucuuguguu

SEQ ID NO: 11238 - RNA, 19 nt, artificial
  Oligomer
uuguagcuucuuguguucu

SEQ ID NO: 11239 - RNA, 19 nt, artificial
  Oligomer
agcuucuuguguucucggc

SEQ ID NO: 11240 - RNA, 19 nt, artificial
  Oligomer
uauuucggaugucuucaau

SEQ ID NO: 11241 - RNA, 19 nt, artificial
  Oligomer
gacaauggcacugaacagg

SEQ ID NO: 11242 - RNA, 19 nt, artificial
  Oligomer
uucaaccacuauguugucc

SEQ ID NO: 11243 - RNA, 19 nt, artificial
  Oligomer
ucugugcucuacuucuugc

SEQ ID NO: 11244 - RNA, 19 nt, artificial
  Oligomer
cugugcucuacuucuugcc

SEQ ID NO: 11245 - RNA, 19 nt, artificial
  Oligomer
uggguacuguucagauugg

SEQ ID NO: 11246 - RNA, 19 nt, artificial
  Oligomer
cuugggagcuuugaaaacc

SEQ ID NO: 11247 - RNA, 19 nt, artificial
  Oligomer
gagcuuugaaaacccuugu

SEQ ID NO: 11248 - RNA, 19 nt, artificial
  Oligomer
aaugacagcuggcauuucu

SEQ ID NO: 11249 - RNA, 19 nt, artificial
  Oligomer
auuucucauguagacacca

SEQ ID NO: 11250 - RNA, 19 nt, artificial
  Oligomer
aaacauucuaugucuugac

SEQ ID NO: 11251 - RNA, 19 nt, artificial
  Oligomer
aacauucuaugucuugacc

SEQ ID NO: 11252 - RNA, 19 nt, artificial
  Oligomer
guuaaagagcugaguaugg

SEQ ID NO: 11253 - RNA, 19 nt, artificial
  Oligomer
cuucuugccuucacccuca

SEQ ID NO: 11254 - RNA, 19 nt, artificial
  Oligomer
ucuuuguuuccuggugccc

SEQ ID NO: 11255 - RNA, 19 nt, artificial
  Oligomer
uucuugccuucacccucac

SEQ ID NO: 11256 - RNA, 19 nt, artificial
  Oligomer
cucccucaaaugucagucc

SEQ ID NO: 11257 - RNA, 19 nt, artificial
  Oligomer
cuuuucaccuccacacuug

SEQ ID NO: 11258 - RNA, 19 nt, artificial
  Oligomer
uuucaccuccacacuuguc

SEQ ID NO: 11259 - RNA, 19 nt, artificial
  Oligomer
auagucuccugccuuuucu

SEQ ID NO: 11260 - RNA, 19 nt, artificial
  Oligomer
aagguggauucugauggag

SEQ ID NO: 11261 - RNA, 19 nt, artificial
  Oligomer
agcugggugacauaaaugu

SEQ ID NO: 11262 - RNA, 19 nt, artificial
  Oligomer
aaggaugacuugaagacca

SEQ ID NO: 11263 - RNA, 19 nt, artificial
  Oligomer
uucacccucacucuuccag

SEQ ID NO: 11264 - RNA, 19 nt, artificial
  Oligomer
uugucaccuccauagauga

SEQ ID NO: 11265 - RNA, 19 nt, artificial
  Oligomer
auguagaggugguggguca

SEQ ID NO: 11266 - RNA, 19 nt, artificial
  Oligomer
cacgucggaaagaacaugg

SEQ ID NO: 11267 - RNA, 19 nt, artificial
  Oligomer
aaaaggcacauagcgguug

SEQ ID NO: 11268 - RNA, 19 nt, artificial
  Oligomer
auagcgguugaggaaaguc

SEQ ID NO: 11269 - RNA, 19 nt, artificial
  Oligomer
caggaagguuaugagguug

SEQ ID NO: 11270 - RNA, 19 nt, artificial
  Oligomer
uaagagaacaugaaggaga

SEQ ID NO: 11271 - RNA, 19 nt, artificial
  Oligomer
aagagaacaugaaggagac

SEQ ID NO: 11272 - RNA, 19 nt, artificial
  Oligomer
aacaugaaggagacgcugg

SEQ ID NO: 11273 - RNA, 19 nt, artificial
  Oligomer
aagugaaaauccucccaug

SEQ ID NO: 11274 - RNA, 19 nt, artificial
  Oligomer
aaauccucccaugucagcu

SEQ ID NO: 11275 - RNA, 19 nt, artificial
  Oligomer
uuaaaccagccgucauagc

SEQ ID NO: 11276 - RNA, 19 nt, artificial
  Oligomer
agcuggaugaugaugggac

SEQ ID NO: 11277 - RNA, 19 nt, artificial
  Oligomer
ucucuuugaguuucuuuug

SEQ ID NO: 11278 - RNA, 19 nt, artificial
  Oligomer
cuuuuguagcuucuugugu

SEQ ID NO: 11279 - RNA, 19 nt, artificial
  Oligomer
uguagcuucuuguguucuc

SEQ ID NO: 11280 - RNA, 19 nt, artificial
  Oligomer
uagcuucuuguguucucgg

SEQ ID NO: 11281 - RNA, 19 nt, artificial
  Oligomer
aaagaagucaagcacaguc

SEQ ID NO: 11282 - RNA, 19 nt, artificial
  Oligomer
augccagacaaagacauug

SEQ ID NO: 11283 - RNA, 19 nt, artificial
  Oligomer
acaauggcacugaacaggg

SEQ ID NO: 11284 - RNA, 19 nt, artificial
  Oligomer
uuacagcucagcuuuuuag

SEQ ID NO: 11285 - RNA, 19 nt, artificial
  Oligomer
gaccacuccaguagaugca

SEQ ID NO: 11286 - RNA, 19 nt, artificial
  Oligomer
uccaguagaugcagagagg

SEQ ID NO: 11287 - RNA, 19 nt, artificial
  Oligomer
caaauaccaaagcaacgca

SEQ ID NO: 11288 - RNA, 19 nt, artificial
  Oligomer
uguaccuuuucaccuccac

SEQ ID NO: 11289 - RNA, 19 nt, artificial
  Oligomer
uuuucaccuccacacuugu

SEQ ID NO: 11290 - RNA, 19 nt, artificial
  Oligomer
gacuuauaaucaucaugca

SEQ ID NO: 11291 - RNA, 19 nt, artificial
  Oligomer
cuuauaaucaucaugcacu

SEQ ID NO: 11292 - RNA, 19 nt, artificial
  Oligomer
uccugccuuuucucauuug

SEQ ID NO: 11293 - RNA, 19 nt, artificial
  Oligomer
gugcacagaagagaaggca

SEQ ID NO: 11294 - RNA, 19 nt, artificial
  Oligomer
ucagaaguucucauagugg

SEQ ID NO: 11295 - RNA, 19 nt, artificial
  Oligomer
caggccuucucuacauucu

SEQ ID NO: 11296 - RNA, 19 nt, artificial
  Oligomer
cacucauacacagcgaugu

SEQ ID NO: 11297 - RNA, 19 nt, artificial
  Oligomer
caccucaaauuuaugccac

SEQ ID NO: 11298 - RNA, 19 nt, artificial
  Oligomer
aauugcagguaggucacuc

SEQ ID NO: 11299 - RNA, 19 nt, artificial
  Oligomer
auagagcaggauguagagg

SEQ ID NO: 11300 - RNA, 19 nt, artificial
  Oligomer
cgaagacauacaugauggc

SEQ ID NO: 11301 - RNA, 19 nt, artificial
  Oligomer
aagcacaccugucauaccu

SEQ ID NO: 11302 - RNA, 19 nt, artificial
  Oligomer
accaccaauagaacuucug

SEQ ID NO: 11303 - RNA, 19 nt, artificial
  Oligomer
uggugagcaagauauaaga

SEQ ID NO: 11304 - RNA, 19 nt, artificial
  Oligomer
uaguaguaagcacgaucug

SEQ ID NO: 11305 - RNA, 19 nt, artificial
  Oligomer
agauggccgagaagauugc

SEQ ID NO: 11306 - RNA, 19 nt, artificial
  Oligomer
aucuucucuugcagcgccu

SEQ ID NO: 11307 - RNA, 19 nt, artificial
  Oligomer
acucucaccuuucucucug

SEQ ID NO: 11308 - RNA, 19 nt, artificial
  Oligomer
uugucagccagagagaaca

SEQ ID NO: 11309 - RNA, 19 nt, artificial
  Oligomer
auggacuccacaaacaugu

SEQ ID NO: 11310 - RNA, 19 nt, artificial
  Oligomer
cuucagaacuaaacagcag

SEQ ID NO: 11311 - RNA, 19 nt, artificial
  Oligomer
ugcucuacuucuugccuuc

SEQ ID NO: 11312 - RNA, 19 nt, artificial
  Oligomer
uacuucuugccuucacccu

SEQ ID NO: 11313 - RNA, 19 nt, artificial
  Oligomer
aucagugguugcuucuagg

SEQ ID NO: 11314 - RNA, 19 nt, artificial
  Oligomer
auauuuuacagcucagcuu

SEQ ID NO: 11315 - RNA, 19 nt, artificial
  Oligomer
gugacaucaagaauaucag

SEQ ID NO: 11316 - RNA, 19 nt, artificial
  Oligomer
caucaagaauaucagggcu

SEQ ID NO: 11317 - RNA, 19 nt, artificial
  Oligomer
cagguucuaagcaucacag

SEQ ID NO: 11318 - RNA, 19 nt, artificial
  Oligomer
aaauaccaaagcaacgcau

SEQ ID NO: 11319 - RNA, 19 nt, artificial
  Oligomer
uguagaacauagucuccug

SEQ ID NO: 11320 - RNA, 19 nt, artificial
  Oligomer
agccacucauacacagcga

SEQ ID NO: 11321 - RNA, 19 nt, artificial
  Oligomer
gaggcgaagacauacauga

SEQ ID NO: 11322 - RNA, 19 nt, artificial
  Oligomer
aagauguagacauugacug

SEQ ID NO: 11323 - RNA, 19 nt, artificial
  Oligomer
agagccugauacacaccgu

SEQ ID NO: 11324 - RNA, 19 nt, artificial
  Oligomer
uucuccacgaagcgcuugu

SEQ ID NO: 11325 - RNA, 19 nt, artificial
  Oligomer
cucgcugcaucuucucuug

SEQ ID NO: 11326 - RNA, 19 nt, artificial
  Oligomer
caaaccucuucuucagucc

SEQ ID NO: 11327 - RNA, 19 nt, artificial
  Oligomer
cuaaacagcagcaccaggu

SEQ ID NO: 11328 - RNA, 19 nt, artificial
  Oligomer
aaacagcagcaccagguca

SEQ ID NO: 11329 - RNA, 19 nt, artificial
  Oligomer
cagagagcaaugaugguga

SEQ ID NO: 11330 - RNA, 19 nt, artificial
  Oligomer
gagcaaugauggugauggc

SEQ ID NO: 11331 - RNA, 19 nt, artificial
  Oligomer
cuuuaugccagacaaagac

SEQ ID NO: 11332 - RNA, 19 nt, artificial
  Oligomer
cagacaaagacauugggcu

SEQ ID NO: 11333 - RNA, 19 nt, artificial
  Oligomer
ucuguacgggagaauuugc

SEQ ID NO: 11334 - RNA, 19 nt, artificial
  Oligomer
uucugugcucuacuucuug

SEQ ID NO: 11335 - RNA, 19 nt, artificial
  Oligomer
cauucuaugucuugaccug

SEQ ID NO: 11336 - RNA, 19 nt, artificial
  Oligomer
aauauuuuacagcucagcu

SEQ ID NO: 11337 - RNA, 19 nt, artificial
  Oligomer
uacagcucagcuuuuuagg

SEQ ID NO: 11338 - RNA, 19 nt, artificial
  Oligomer
uaaagagcugaguauggag

SEQ ID NO: 11339 - RNA, 19 nt, artificial
  Oligomer
ucaaaugucaguccaagca

SEQ ID NO: 11340 - RNA, 19 nt, artificial
  Oligomer
uccaagcaaauaccaaagc

SEQ ID NO: 11341 - RNA, 19 nt, artificial
  Oligomer
aagcacuauuguaccuuuu

SEQ ID NO: 11342 - RNA, 19 nt, artificial
  Oligomer
cagaaguucucauaguggu

SEQ ID NO: 11343 - RNA, 19 nt, artificial
  Oligomer
ugcagggaguugaagaagg

SEQ ID NO: 11344 - RNA, 19 nt, artificial
  Oligomer
aggaugacuugaagaccag

SEQ ID NO: 11345 - RNA, 19 nt, artificial
  Oligomer
uggaauugcagguagguca

SEQ ID NO: 11346 - RNA, 19 nt, artificial
  Oligomer
gugagcaagauauaagaga

SEQ ID NO: 11347 - RNA, 19 nt, artificial
  Oligomer
aagauugccacacacacga

SEQ ID NO: 11348 - RNA, 19 nt, artificial
  Oligomer
uuuugccaaaccucuucuu

SEQ ID NO: 11349 - RNA, 19 nt, artificial
  Oligomer
uuugccaaaccucuucuuc

SEQ ID NO: 11350 - RNA, 19 nt, artificial
  Oligomer
accuccaccuuugacacag

SEQ ID NO: 11351 - RNA, 19 nt, artificial
  Oligomer
cuuucaugaagaccaccag

SEQ ID NO: 11352 - RNA, 19 nt, artificial
  Oligomer
aacuaaacagcagcaccag

SEQ ID NO: 11353 - RNA, 19 nt, artificial
  Oligomer
augauggugauggcaaaac

SEQ ID NO: 11354 - RNA, 19 nt, artificial
  Oligomer
acaaagacauugggcugca

SEQ ID NO: 11355 - RNA, 19 nt, artificial
  Oligomer
uccuccaacuccgaaaucu

SEQ ID NO: 11356 - RNA, 19 nt, artificial
  Oligomer
ggguacuguucagauuggg

SEQ ID NO: 11357 - RNA, 19 nt, artificial
  Oligomer
caucagugguugcuucuag

SEQ ID NO: 11358 - RNA, 19 nt, artificial
  Oligomer
gaaacauucuaugucuuga

SEQ ID NO: 11359 - RNA, 19 nt, artificial
  Oligomer
uccagguucuaagcaucac

SEQ ID NO: 11360 - RNA, 19 nt, artificial
  Oligomer
cucagaaguucucauagug

SEQ ID NO: 11361 - RNA, 19 nt, artificial
  Oligomer
cagcuugucaccuccauag

SEQ ID NO: 11362 - RNA, 19 nt, artificial
  Oligomer
agagcaggauguagaggug

SEQ ID NO: 11363 - RNA, 19 nt, artificial
  Oligomer
acgucggaaagaacauggu

SEQ ID NO: 11364 - RNA, 19 nt, artificial
  Oligomer
ugcacucucaccuuucucu

SEQ ID NO: 11365 - RNA, 19 nt, artificial
  Oligomer
auugccacacacacgaugu

SEQ ID NO: 11366 - RNA, 19 nt, artificial
  Oligomer
acucccggaacauagacuc

SEQ ID NO: 11367 - RNA, 19 nt, artificial
  Oligomer
agccuuucaugaagaccac

SEQ ID NO: 11368 - RNA, 19 nt, artificial
  Oligomer
aacauggacuccacaaaca

SEQ ID NO: 11369 - RNA, 19 nt, artificial
  Oligomer
cugagcaaaaaggugucug

SEQ ID NO: 11370 - RNA, 19 nt, artificial
  Oligomer
ugagcaaaaaggugucuga

SEQ ID NO: 11371 - RNA, 19 nt, artificial
  Oligomer
agacucacuaagggaaggc

SEQ ID NO: 11372 - RNA, 19 nt, artificial
  Oligomer
ucaaagaagucaagcacag

SEQ ID NO: 11373 - RNA, 19 nt, artificial
  Oligomer
cacauagucuguacgggag

SEQ ID NO: 11374 - RNA, 19 nt, artificial
  Oligomer
cuccaacuccgaaaucugg

SEQ ID NO: 11375 - RNA, 19 nt, artificial
  Oligomer
augacagcuggcauuucuc

SEQ ID NO: 11376 - RNA, 19 nt, artificial
  Oligomer
uuuuacagcucagcuuuuu

SEQ ID NO: 11377 - RNA, 19 nt, artificial
  Oligomer
uaucacuggugacaucaag

SEQ ID NO: 11378 - RNA, 19 nt, artificial
  Oligomer
ugacaucaagaauaucagg

SEQ ID NO: 11379 - RNA, 19 nt, artificial
  Oligomer
ucccucaaaugucagucca

SEQ ID NO: 11380 - RNA, 19 nt, artificial
  Oligomer
ugucaguccaagcaaauac

SEQ ID NO: 11381 - RNA, 19 nt, artificial
  Oligomer
uugauaaacagguggacuu

SEQ ID NO: 11382 - RNA, 19 nt, artificial
  Oligomer
uugccuucacccucacucu

SEQ ID NO: 11383 - RNA, 19 nt, artificial
  Oligomer
acagguggacuuauaauca

SEQ ID NO: 11384 - RNA, 19 nt, artificial
  Oligomer
uaggugcacagaagagaag

SEQ ID NO: 11385 - RNA, 19 nt, artificial
  Oligomer
agggaguugaagaagggcu

SEQ ID NO: 11386 - RNA, 19 nt, artificial
  Oligomer
cuccgguucagcacuuucu

SEQ ID NO: 11387 - RNA, 19 nt, artificial
  Oligomer
uugaggauggaggcaaagg

SEQ ID NO: 11388 - RNA, 19 nt, artificial
  Oligomer
uccaaacgguccaucaagg

SEQ ID NO: 11389 - RNA, 19 nt, artificial
  Oligomer
gucggaaagaacaugguag

SEQ ID NO: 11390 - RNA, 19 nt, artificial
  Oligomer
ucggaaagaacaugguagc

SEQ ID NO: 11391 - RNA, 19 nt, artificial
  Oligomer
uuggacccaucauucacaa

SEQ ID NO: 11392 - RNA, 19 nt, artificial
  Oligomer
uccagagccugauacacac

SEQ ID NO: 11393 - RNA, 19 nt, artificial
  Oligomer
augaacgagacucgacagc

SEQ ID NO: 11394 - RNA, 19 nt, artificial
  Oligomer
gagccuuucaugaagacca

SEQ ID NO: 11395 - RNA, 19 nt, artificial
  Oligomer
cuccacaaacauguccugg

SEQ ID NO: 11396 - RNA, 19 nt, artificial
  Oligomer
gaacuaaacagcagcacca

SEQ ID NO: 11397 - RNA, 19 nt, artificial
  Oligomer
aggcagcagagagcaauga

SEQ ID NO: 11398 - RNA, 19 nt, artificial
  Oligomer
uuuaugccagacaaagaca

SEQ ID NO: 11399 - RNA, 19 nt, artificial
  Oligomer
uuaugccagacaaagacau

SEQ ID NO: 11400 - RNA, 19 nt, artificial
  Oligomer
aaagacauugggcugcagg

SEQ ID NO: 11401 - RNA, 19 nt, artificial
  Oligomer
agcagcucauucaccuccu

SEQ ID NO: 11402 - RNA, 19 nt, artificial
  Oligomer
cuuccggaaaugacagcug

SEQ ID NO: 11403 - RNA, 19 nt, artificial
  Oligomer
uuuuuaggaaagagcccga

SEQ ID NO: 11404 - RNA, 19 nt, artificial
  Oligomer
gucaguccaagcaaauacc

SEQ ID NO: 11405 - RNA, 19 nt, artificial
  Oligomer
aacauagucuccugccuuu

SEQ ID NO: 11406 - RNA, 19 nt, artificial
  Oligomer
gucugggucaauauucucc

SEQ ID NO: 11407 - RNA, 19 nt, artificial
  Oligomer
uugccaaaccucuucuuca

SEQ ID NO: 11408 - RNA, 19 nt, artificial
  Oligomer
ugccaaaccucuucuucag

SEQ ID NO: 11409 - RNA, 19 nt, artificial
  Oligomer
auccagucagaagagcucc

SEQ ID NO: 11410 - RNA, 19 nt, artificial
  Oligomer
acuccacaaacauguccug

SEQ ID NO: 11411 - RNA, 19 nt, artificial
  Oligomer
agaggccaccacaaauucc

SEQ ID NO: 11412 - RNA, 19 nt, artificial
  Oligomer
agaacauagucuccugccu

SEQ ID NO: 11413 - RNA, 19 nt, artificial
  Oligomer
gacaggcucagaaguucuc

SEQ ID NO: 11414 - RNA, 19 nt, artificial
  Oligomer
uucaccacgcugaucucca

SEQ ID NO: 11415 - RNA, 19 nt, artificial
  Oligomer
aggguggucugugcaaugu

SEQ ID NO: 11416 - RNA, 19 nt, artificial
  Oligomer
auuuccaccuccaccucca

SEQ ID NO: 11417 - RNA, 19 nt, artificial
  Oligomer
auguuguccuccaacuccg

SEQ ID NO: 11418 - RNA, 19 nt, artificial
  Oligomer
aacgcaucgauuuugugga

SEQ ID NO: 11419 - RNA, 19 nt, artificial
  Oligomer
ucugggucaauauucuccc

SEQ ID NO: 11420 - RNA, 19 nt, artificial
  Oligomer
cauucuuggucauuccugg

SEQ ID NO: 11421 - RNA, 19 nt, artificial
  Oligomer
guguccgagugaugaacga

SEQ ID NO: 11422 - RNA, 19 nt, artificial
  Oligomer
uaccauuuccaccuccacc

SEQ ID NO: 11423 - RNA, 19 nt, artificial
  Oligomer
aaggacagguagccauugc

SEQ ID NO: 11424 - RNA, 19 nt, artificial
  Oligomer
uucagaugucuucuuuccu

SEQ ID NO: 11425 - RNA, 19 nt, artificial
  Oligomer
aaauaggccaccacuccag

SEQ ID NO: 11426 - RNA, 19 nt, artificial
  Oligomer
cagaugucuucuuuccucu

SEQ ID NO: 11427 - RNA, 19 nt, artificial
  Oligomer
uugagaucacuccaguucc

SEQ ID NO: 11428 - RNA, 19 nt, artificial
  Oligomer
uauguuguccuccaacucc

SEQ ID NO: 11429 - RNA, 19 nt, artificial
  Oligomer
aucacagcuucugcacugg

SEQ ID NO: 11430 - RNA, 19 nt, artificial
  Oligomer
uuugggagauccugacugg

SEQ ID NO: 11431 - RNA, 19 nt, artificial
  Oligomer
cugggugacauaaaugugc

SEQ ID NO: 11432 - RNA, 19 nt, artificial
  Oligomer
uacacagcauuuggcugcc

SEQ ID NO: 11433 - RNA, 19 nt, artificial
  Oligomer
acuguccugacuuguacuc

SEQ ID NO: 11434 - RNA, 19 nt, artificial
  Oligomer
uuguacucaaagccuuggg

SEQ ID NO: 11435 - RNA, 19 nt, artificial
  Oligomer
gauguagacauugacugcg

SEQ ID NO: 11436 - RNA, 19 nt, artificial
  Oligomer
auguagacauugacugcgu

SEQ ID NO: 11437 - RNA, 19 nt, artificial
  Oligomer
accauuuccaccuccaccu

SEQ ID NO: 11438 - RNA, 19 nt, artificial
  Oligomer
gacucacuaagggaaggca

SEQ ID NO: 11439 - RNA, 19 nt, artificial
  Oligomer
uuaguaggaccaaaacugg

SEQ ID NO: 11440 - RNA, 19 nt, artificial
  Oligomer
uuuuaggaaagagcccgau

SEQ ID NO: 11441 - RNA, 19 nt, artificial
  Oligomer
uacugaauaucuggcagag

SEQ ID NO: 11442 - RNA, 19 nt, artificial
  Oligomer
aaguagggcugcuccuuuu

SEQ ID NO: 11443 - RNA, 19 nt, artificial
  Oligomer
acgguauccuguauacucc

SEQ ID NO: 11444 - RNA, 19 nt, artificial
  Oligomer
agauguagacauugacugc

SEQ ID NO: 11445 - RNA, 19 nt, artificial
  Oligomer
accuuugacacagagcugc

SEQ ID NO: 11446 - RNA, 19 nt, artificial
  Oligomer
aaaaaggugucugaagaag

SEQ ID NO: 11447 - RNA, 19 nt, artificial
  Oligomer
uagggaucuugagcagcag

SEQ ID NO: 11448 - RNA, 19 nt, artificial
  Oligomer
aauguugauaacagcgacc

SEQ ID NO: 11449 - RNA, 19 nt, artificial
  Oligomer
uuguucaggaccuuccgga

SEQ ID NO: 11450 - RNA, 19 nt, artificial
  Oligomer
ucuacuucuugccuucacc

SEQ ID NO: 11451 - RNA, 19 nt, artificial
  Oligomer
aggaccaaaacuggauuug

SEQ ID NO: 11452 - RNA, 19 nt, artificial
  Oligomer
uuugguagaaaucacauca

SEQ ID NO: 11453 - RNA, 19 nt, artificial
  Oligomer
guggugguaaaacauguac

SEQ ID NO: 11454 - RNA, 19 nt, artificial
  Oligomer
agaaaaguuaaagagcuga

SEQ ID NO: 11455 - RNA, 19 nt, artificial
  Oligomer
uaucuucuuugggagaucc

SEQ ID NO: 11456 - RNA, 19 nt, artificial
  Oligomer
guauccuguauacuccggg

SEQ ID NO: 11457 - RNA, 19 nt, artificial
  Oligomer
ucaucaugcacugcaauug

SEQ ID NO: 11458 - RNA, 19 nt, artificial
  Oligomer
aucaugcacugcaauugua

SEQ ID NO: 11459 - RNA, 19 nt, artificial
  Oligomer
augcacugcaauuguagaa

SEQ ID NO: 11460 - RNA, 19 nt, artificial
  Oligomer
uacuccgggaguguuuucu

SEQ ID NO: 11461 - RNA, 19 nt, artificial
  Oligomer
uacacagcgauguucuggu

SEQ ID NO: 11462 - RNA, 19 nt, artificial
  Oligomer
aucaaaaggcacauagcgg

SEQ ID NO: 11463 - RNA, 19 nt, artificial
  Oligomer
guacugcugcagcuuuugg

SEQ ID NO: 11464 - RNA, 19 nt, artificial
  Oligomer
gauccagucagaagagcuc

SEQ ID NO: 11465 - RNA, 19 nt, artificial
  Oligomer
uugauguccagcaccugag

SEQ ID NO: 11466 - RNA, 19 nt, artificial
  Oligomer
aauagcuccuucucgcuca

SEQ ID NO: 11467 - RNA, 19 nt, artificial
  Oligomer
agagcaaugauggugaugg

SEQ ID NO: 11468 - RNA, 19 nt, artificial
  Oligomer
auaacagcgaccagcacgu

SEQ ID NO: 11469 - RNA, 19 nt, artificial
  Oligomer
uguucucaaaccaguagcg

SEQ ID NO: 11470 - RNA, 19 nt, artificial
  Oligomer
ucaaccacuauguuguccu

SEQ ID NO: 11471 - RNA, 19 nt, artificial
  Oligomer
cucuacuucuugccuucac

SEQ ID NO: 11472 - RNA, 19 nt, artificial
  Oligomer
aaacccuuguucaggaccu

SEQ ID NO: 11473 - RNA, 19 nt, artificial
  Oligomer
uaggaccaaaacuggauuu

SEQ ID NO: 11474 - RNA, 19 nt, artificial
  Oligomer
cuuuuuaggaaagagcccg

SEQ ID NO: 11475 - RNA, 19 nt, artificial
  Oligomer
cuuugggagauccugacug

SEQ ID NO: 11476 - RNA, 19 nt, artificial
  Oligomer
aauauucucccaauauugg

SEQ ID NO: 11477 - RNA, 19 nt, artificial
  Oligomer
auauucucccaauauuggg

SEQ ID NO: 11478 - RNA, 19 nt, artificial
  Oligomer
aaggcaggauacuggaagc

SEQ ID NO: 11479 - RNA, 19 nt, artificial
  Oligomer
cagauguauagcauggugg

SEQ ID NO: 11480 - RNA, 19 nt, artificial
  Oligomer
uuacacagcauuuggcugc

SEQ ID NO: 11481 - RNA, 19 nt, artificial
  Oligomer
aaaggcacauagcgguuga

SEQ ID NO: 11482 - RNA, 19 nt, artificial
  Oligomer
gagaacaugaaggagacgc

SEQ ID NO: 11483 - RNA, 19 nt, artificial
  Oligomer
aaccucuucuucaguccag

SEQ ID NO: 11484 - RNA, 19 nt, artificial
  Oligomer
aacauagacuccaccaccu

SEQ ID NO: 11485 - RNA, 19 nt, artificial
  Oligomer
gaggaagccauucucaucc

SEQ ID NO: 11486 - RNA, 19 nt, artificial
  Oligomer
auccaggucauacauggua

SEQ ID NO: 11487 - RNA, 19 nt, artificial
  Oligomer
augagguugaccugcugca

SEQ ID NO: 11488 - RNA, 19 nt, artificial
  Oligomer
uugaguuucuuuuguagcu

SEQ ID NO: 11489 - RNA, 19 nt, artificial
  Oligomer
uccagagagaagcagacuc

SEQ ID NO: 11490 - RNA, 19 nt, artificial
  Oligomer
ugagcugcuuagguugagg

SEQ ID NO: 11491 - RNA, 19 nt, artificial
  Oligomer
uuccugguguucucaaacc

SEQ ID NO: 11492 - RNA, 19 nt, artificial
  Oligomer
uacgggagaauuugccagg

SEQ ID NO: 11493 - RNA, 19 nt, artificial
  Oligomer
uugggagcuuugaaaaccc

SEQ ID NO: 11494 - RNA, 19 nt, artificial
  Oligomer
auuugguagaaaucacauc

SEQ ID NO: 11495 - RNA, 19 nt, artificial
  Oligomer
uucuaugucuugaccuggg

SEQ ID NO: 11496 - RNA, 19 nt, artificial
  Oligomer
aagaaaaguuaaagagcug

SEQ ID NO: 11497 - RNA, 19 nt, artificial
  Oligomer
gaaaaguuaaagagcugag

SEQ ID NO: 11498 - RNA, 19 nt, artificial
  Oligomer
aaaaguuaaagagcugagu

SEQ ID NO: 11499 - RNA, 19 nt, artificial
  Oligomer
uucuaagcaucacagcuuc

SEQ ID NO: 11500 - RNA, 19 nt, artificial
  Oligomer
uuuucugcaggaagcuggg

SEQ ID NO: 11501 - RNA, 19 nt, artificial
  Oligomer
auagcauggugguccugag

SEQ ID NO: 11502 - RNA, 19 nt, artificial
  Oligomer
uaaaugugcacagacacca

SEQ ID NO: 11503 - RNA, 19 nt, artificial
  Oligomer
auacacagcgauguucugg

SEQ ID NO: 11504 - RNA, 19 nt, artificial
  Oligomer
aaauuuaugccacuccuga

SEQ ID NO: 11505 - RNA, 19 nt, artificial
  Oligomer
gaccaggaaguagaugugg

SEQ ID NO: 11506 - RNA, 19 nt, artificial
  Oligomer
uggaucagagcauagcugc

SEQ ID NO: 11507 - RNA, 19 nt, artificial
  Oligomer
ucaaaaggcacauagcggu

SEQ ID NO: 11508 - RNA, 19 nt, artificial
  Oligomer
uuuugggcuaggaagccuc

SEQ ID NO: 11509 - RNA, 19 nt, artificial
  Oligomer
caugucagcuccuccuugu

SEQ ID NO: 11510 - RNA, 19 nt, artificial
  Oligomer
uuggacaggcaguuguugg

SEQ ID NO: 11511 - RNA, 19 nt, artificial
  Oligomer
uuggagaggaagccauucu

SEQ ID NO: 11512 - RNA, 19 nt, artificial
  Oligomer
uuucaugaagaccaccagg

SEQ ID NO: 11513 - RNA, 19 nt, artificial
  Oligomer
uccuuagggaucuugagca

SEQ ID NO: 11514 - RNA, 19 nt, artificial
  Oligomer
auccucgguuguuggacag

SEQ ID NO: 11515 - RNA, 19 nt, artificial
  Oligomer
uugugagcugcuuagguug

SEQ ID NO: 11516 - RNA, 19 nt, artificial
  Oligomer
gugagcugcuuagguugag

SEQ ID NO: 11517 - RNA, 19 nt, artificial
  Oligomer
aucuuugcuucugugcucu

SEQ ID NO: 11518 - RNA, 19 nt, artificial
  Oligomer
ucuucaaccacuauguugu

SEQ ID NO: 11519 - RNA, 19 nt, artificial
  Oligomer
caaccacuauguuguccuc

SEQ ID NO: 11520 - RNA, 19 nt, artificial
  Oligomer
gaaaacccuuguucaggac

SEQ ID NO: 11521 - RNA, 19 nt, artificial
  Oligomer
aaaacccuuguucaggacc

SEQ ID NO: 11522 - RNA, 19 nt, artificial
  Oligomer
uggcauuucucauguagac

SEQ ID NO: 11523 - RNA, 19 nt, artificial
  Oligomer
caucuuuguuuccuggugc

SEQ ID NO: 11524 - RNA, 19 nt, artificial
  Oligomer
cuaagcaucacagcuucug

SEQ ID NO: 11525 - RNA, 19 nt, artificial
  Oligomer
uaagcaucacagcuucugc

SEQ ID NO: 11526 - RNA, 19 nt, artificial
  Oligomer
gguauccuguauacuccgg

SEQ ID NO: 11527 - RNA, 19 nt, artificial
  Oligomer
uauccuguauacuccggga

SEQ ID NO: 11528 - RNA, 19 nt, artificial
  Oligomer
ugcacugcaauuguagaac

SEQ ID NO: 11529 - RNA, 19 nt, artificial
  Oligomer
uauucucccaauauuggga

SEQ ID NO: 11530 - RNA, 19 nt, artificial
  Oligomer
uucuuggucauuccuggag

SEQ ID NO: 11531 - RNA, 19 nt, artificial
  Oligomer
ugggugacauaaaugugca

SEQ ID NO: 11532 - RNA, 19 nt, artificial
  Oligomer
ucaaauuuaugccacuccu

SEQ ID NO: 11533 - RNA, 19 nt, artificial
  Oligomer
guagacauugacugcgugg

SEQ ID NO: 11534 - RNA, 19 nt, artificial
  Oligomer
cagcacugugcaaaauggc

SEQ ID NO: 11535 - RNA, 19 nt, artificial
  Oligomer
uugaggaaagucucucgca

SEQ ID NO: 11536 - RNA, 19 nt, artificial
  Oligomer
uacugcugcagcuuuuggg

SEQ ID NO: 11537 - RNA, 19 nt, artificial
  Oligomer
cucagguuguuaaaccagc

SEQ ID NO: 11538 - RNA, 19 nt, artificial
  Oligomer
aucucgaugaaggaucgca

SEQ ID NO: 11539 - RNA, 19 nt, artificial
  Oligomer
auggugaagaauucguccu

SEQ ID NO: 11540 - RNA, 19 nt, artificial
  Oligomer
uagacgggacuuauccucu

SEQ ID NO: 11541 - RNA, 19 nt, artificial
  Oligomer
cccagacaauuauacaaau

SEQ ID NO: 11542 - RNA, 19 nt, artificial
  Oligomer
cccagacaauuauacaaau

SEQ ID NO: 11543 - RNA, 19 nt, artificial
  Oligomer
acccagacaauuauacaaa

SEQ ID NO: 11544 - RNA, 19 nt, artificial
  Oligomer
cuaauugacuuccacaaaa

SEQ ID NO: 11545 - RNA, 19 nt, artificial
  Oligomer
agaauauugacccagacaa

SEQ ID NO: 11546 - RNA, 19 nt, artificial
  Oligomer
caguacucgaucucaauuc

SEQ ID NO: 11547 - RNA, 19 nt, artificial
  Oligomer
ucaguacucgaucucaauu

SEQ ID NO: 11548 - RNA, 19 nt, artificial
  Oligomer
gaauauugacccagacaau

SEQ ID NO: 11549 - RNA, 19 nt, artificial
  Oligomer
ccacuuuccacaucuacuu

SEQ ID NO: 11550 - RNA, 19 nt, artificial
  Oligomer
gggaggauuuucacuucau

SEQ ID NO: 11551 - RNA, 19 nt, artificial
  Oligomer
ggagcuauuuaggaaggcu

SEQ ID NO: 11552 - RNA, 19 nt, artificial
  Oligomer
ugguccuacuaaauauacu

SEQ ID NO: 11553 - RNA, 19 nt, artificial
  Oligomer
cucuaauugacuuccacaa

SEQ ID NO: 11554 - RNA, 19 nt, artificial
  Oligomer
gccacgcagucaaugucua

SEQ ID NO: 11555 - RNA, 19 nt, artificial
  Oligomer
ccaacaccacccuaaacca

SEQ ID NO: 11556 - RNA, 19 nt, artificial
  Oligomer
ggaggacaacauagugguu

SEQ ID NO: 11557 - RNA, 19 nt, artificial
  Oligomer
ccuuuuucaucgggcucuu

SEQ ID NO: 11558 - RNA, 19 nt, artificial
  Oligomer
ggaggugaaaagguacaau

SEQ ID NO: 11559 - RNA, 19 nt, artificial
  Oligomer
gucuaauguuuaccaugua

SEQ ID NO: 11560 - RNA, 19 nt, artificial
  Oligomer
cccgucuaauguuuaccau

SEQ ID NO: 11561 - RNA, 19 nt, artificial
  Oligomer
accucauccuguccaacaa

SEQ ID NO: 11562 - RNA, 19 nt, artificial
  Oligomer
ucaaccucauccuguccaa

SEQ ID NO: 11563 - RNA, 19 nt, artificial
  Oligomer
agacaucugaacccaacac

SEQ ID NO: 11564 - RNA, 19 nt, artificial
  Oligomer
caguuuugguccuacuaaa

SEQ ID NO: 11565 - RNA, 19 nt, artificial
  Oligomer
ccagauauucaguacucga

SEQ ID NO: 11566 - RNA, 19 nt, artificial
  Oligomer
cccaaagugucagcaacuu

SEQ ID NO: 11567 - RNA, 19 nt, artificial
  Oligomer
ugaccaagaauguagagaa

SEQ ID NO: 11568 - RNA, 19 nt, artificial
  Oligomer
cuguuguccuggccauuuu

SEQ ID NO: 11569 - RNA, 19 nt, artificial
  Oligomer
gccgcaaccucauaaccuu

SEQ ID NO: 11570 - RNA, 19 nt, artificial
  Oligomer
ccuucauguucucuuauau

SEQ ID NO: 11571 - RNA, 19 nt, artificial
  Oligomer
ggaggauuuucacuucaug

SEQ ID NO: 11572 - RNA, 19 nt, artificial
  Oligomer
acgaauucuucaccaugau

SEQ ID NO: 11573 - RNA, 19 nt, artificial
  Oligomer
ugccagauauucaguacuc

SEQ ID NO: 11574 - RNA, 19 nt, artificial
  Oligomer
ggcaccaggaaacaaagau

SEQ ID NO: 11575 - RNA, 19 nt, artificial
  Oligomer
gaggugaaaagguacaaua

SEQ ID NO: 11576 - RNA, 19 nt, artificial
  Oligomer
ggucccggcaaucaucuau

SEQ ID NO: 11577 - RNA, 19 nt, artificial
  Oligomer
uccuucauguucucuuaua

SEQ ID NO: 11578 - RNA, 19 nt, artificial
  Oligomer
gaagacaucugaacccaac

SEQ ID NO: 11579 - RNA, 19 nt, artificial
  Oligomer
gcagucccaucaucaucca

SEQ ID NO: 11580 - RNA, 19 nt, artificial
  Oligomer
caagaagcuacaaaagaaa

SEQ ID NO: 11581 - RNA, 19 nt, artificial
  Oligomer
gccagauauucaguacucg

SEQ ID NO: 11582 - RNA, 19 nt, artificial
  Oligomer
caaaaucgaugcguugcuu

SEQ ID NO: 11583 - RNA, 19 nt, artificial
  Oligomer
ggagacuauguucuacaau

SEQ ID NO: 11584 - RNA, 19 nt, artificial
  Oligomer
ggcauaaauuugagguguc

SEQ ID NO: 11585 - RNA, 19 nt, artificial
  Oligomer
ccggcaaucaucuauggag

SEQ ID NO: 11586 - RNA, 19 nt, artificial
  Oligomer
ugcccacuuuccacaucua

SEQ ID NO: 11587 - RNA, 19 nt, artificial
  Oligomer
ccaacgucuuugugaauga

SEQ ID NO: 11588 - RNA, 19 nt, artificial
  Oligomer
ccaucuguguuggcguguu

SEQ ID NO: 11589 - RNA, 19 nt, artificial
  Oligomer
acaccacccuaaaccacag

SEQ ID NO: 11590 - RNA, 19 nt, artificial
  Oligomer
cuauuuaggaaggcuguga

SEQ ID NO: 11591 - RNA, 19 nt, artificial
  Oligomer
gagcuauuuaggaaggcug

SEQ ID NO: 11592 - RNA, 19 nt, artificial
  Oligomer
gaaggagcuauuuaggaag

SEQ ID NO: 11593 - RNA, 19 nt, artificial
  Oligomer
gcgagaaggagcuauuuag

SEQ ID NO: 11594 - RNA, 19 nt, artificial
  Oligomer
cccugacugugcuugacuu

SEQ ID NO: 11595 - RNA, 19 nt, artificial
  Oligomer
gcuacugguuugagaacac

SEQ ID NO: 11596 - RNA, 19 nt, artificial
  Oligomer
ccauuguccucgaccaguu

SEQ ID NO: 11597 - RNA, 19 nt, artificial
  Oligomer
gggucugcaacaacuacug

SEQ ID NO: 11598 - RNA, 19 nt, artificial
  Oligomer
cuggugucuacaugagaaa

SEQ ID NO: 11599 - RNA, 19 nt, artificial
  Oligomer
ccuggugucuacaugagaa

SEQ ID NO: 11600 - RNA, 19 nt, artificial
  Oligomer
cugccagauauucaguacu

SEQ ID NO: 11601 - RNA, 19 nt, artificial
  Oligomer
ucuaauugacuuccacaaa

SEQ ID NO: 11602 - RNA, 19 nt, artificial
  Oligomer
caucucuaauugacuucca

SEQ ID NO: 11603 - RNA, 19 nt, artificial
  Oligomer
ccaaagaagauaaagacca

SEQ ID NO: 11604 - RNA, 19 nt, artificial
  Oligomer
cagugcaugaugauuauaa

SEQ ID NO: 11605 - RNA, 19 nt, artificial
  Oligomer
gcagugcaugaugauuaua

SEQ ID NO: 11606 - RNA, 19 nt, artificial
  Oligomer
ccaagaauguagagaaggc

SEQ ID NO: 11607 - RNA, 19 nt, artificial
  Oligomer
gcaauggcugugcuggaua

SEQ ID NO: 11608 - RNA, 19 nt, artificial
  Oligomer
ccaaggcuuugaguacaag

SEQ ID NO: 11609 - RNA, 19 nt, artificial
  Oligomer
gcaaucaucuauggaggug

SEQ ID NO: 11610 - RNA, 19 nt, artificial
  Oligomer
gucuacaucuucucaguca

SEQ ID NO: 11611 - RNA, 19 nt, artificial
  Oligomer
agacuuuccucaaccgcua

SEQ ID NO: 11612 - RNA, 19 nt, artificial
  Oligomer
gcaaccucauaaccuuccu

SEQ ID NO: 11613 - RNA, 19 nt, artificial
  Oligomer
cuaauguuuaccauguaug

SEQ ID NO: 11614 - RNA, 19 nt, artificial
  Oligomer
ccaucaucauccagcugcu

SEQ ID NO: 11615 - RNA, 19 nt, artificial
  Oligomer
agaagacaucugaacccaa

SEQ ID NO: 11616 - RNA, 19 nt, artificial
  Oligomer
cuacaaaagaaacucaaag

SEQ ID NO: 11617 - RNA, 19 nt, artificial
  Oligomer
gcuacaaaagaaacucaaa

SEQ ID NO: 11618 - RNA, 19 nt, artificial
  Oligomer
gcaacaacuacuggauucg

SEQ ID NO: 11619 - RNA, 19 nt, artificial
  Oligomer
ugcaacaacuacuggauuc

SEQ ID NO: 11620 - RNA, 19 nt, artificial
  Oligomer
ggugucuacaugagaaaug

SEQ ID NO: 11621 - RNA, 19 nt, artificial
  Oligomer
acaaaaucgaugcguugcu

SEQ ID NO: 11622 - RNA, 19 nt, artificial
  Oligomer
cccacaucucuaauugacu

SEQ ID NO: 11623 - RNA, 19 nt, artificial
  Oligomer
ugcagugcaugaugauuau

SEQ ID NO: 11624 - RNA, 19 nt, artificial
  Oligomer
ccaucagaauccaccuuag

SEQ ID NO: 11625 - RNA, 19 nt, artificial
  Oligomer
cccacuucaugcaccacua

SEQ ID NO: 11626 - RNA, 19 nt, artificial
  Oligomer
ggcuuugaguacaagucag

SEQ ID NO: 11627 - RNA, 19 nt, artificial
  Oligomer
gucccggcaaucaucuaug

SEQ ID NO: 11628 - RNA, 19 nt, artificial
  Oligomer
uggccaucauguaugucuu

SEQ ID NO: 11629 - RNA, 19 nt, artificial
  Oligomer
caacgucuuugugaaugau

SEQ ID NO: 11630 - RNA, 19 nt, artificial
  Oligomer
gcuguuguccuggccauuu

SEQ ID NO: 11631 - RNA, 19 nt, artificial
  Oligomer
agaucgugcuuacuacuau

SEQ ID NO: 11632 - RNA, 19 nt, artificial
  Oligomer
agaagagguuuggcaaaaa

SEQ ID NO: 11633 - RNA, 19 nt, artificial
  Oligomer
uggaaaugguauuagagau

SEQ ID NO: 11634 - RNA, 19 nt, artificial
  Oligomer
uggagguggaaaugguauu

SEQ ID NO: 11635 - RNA, 19 nt, artificial
  Oligomer
ggauuuucacuucaugcug

SEQ ID NO: 11636 - RNA, 19 nt, artificial
  Oligomer
ugacaugggaggauuuuca

SEQ ID NO: 11637 - RNA, 19 nt, artificial
  Oligomer
ugaagaaggaagcagccaa

SEQ ID NO: 11638 - RNA, 19 nt, artificial
  Oligomer
acaaaagaaacucaaagag

SEQ ID NO: 11639 - RNA, 19 nt, artificial
  Oligomer
cccuuagugagucugcuuc

SEQ ID NO: 11640 - RNA, 19 nt, artificial
  Oligomer
agcaaagauuuuaagagga

SEQ ID NO: 11641 - RNA, 19 nt, artificial
  Oligomer
ucagugccauuguccucga

SEQ ID NO: 11642 - RNA, 19 nt, artificial
  Oligomer
cugcaacaacuacuggauu

SEQ ID NO: 11643 - RNA, 19 nt, artificial
  Oligomer
ucagggucugcaacaacua

SEQ ID NO: 11644 - RNA, 19 nt, artificial
  Oligomer
cucucagggucugcaacaa

SEQ ID NO: 11645 - RNA, 19 nt, artificial
  Oligomer
ccaggucaagacauagaau

SEQ ID NO: 11646 - RNA, 19 nt, artificial
  Oligomer
cccugauauucuugauguc

SEQ ID NO: 11647 - RNA, 19 nt, artificial
  Oligomer
cacaucucuaauugacuuc

SEQ ID NO: 11648 - RNA, 19 nt, artificial
  Oligomer
uggaggugaaaagguacaa

SEQ ID NO: 11649 - RNA, 19 nt, artificial
  Oligomer
ucccaaagaagauaaagac

SEQ ID NO: 11650 - RNA, 19 nt, artificial
  Oligomer
aggagacuauguucuacaa

SEQ ID NO: 11651 - RNA, 19 nt, artificial
  Oligomer
gacccagacaauuauacaa

SEQ ID NO: 11652 - RNA, 19 nt, artificial
  Oligomer
cccggcaaucaucuaugga

SEQ ID NO: 11653 - RNA, 19 nt, artificial
  Oligomer
gcccacuuuccacaucuac

SEQ ID NO: 11654 - RNA, 19 nt, artificial
  Oligomer
ucaucauccauggcagcua

SEQ ID NO: 11655 - RNA, 19 nt, artificial
  Oligomer
uccuggccaucauguaugu

SEQ ID NO: 11656 - RNA, 19 nt, artificial
  Oligomer
agaaguucuauuggugguu

SEQ ID NO: 11657 - RNA, 19 nt, artificial
  Oligomer
cccaacgucuuugugaaug

SEQ ID NO: 11658 - RNA, 19 nt, artificial
  Oligomer
cuuauaucuugcucaccau

SEQ ID NO: 11659 - RNA, 19 nt, artificial
  Oligomer
gugcuuacuacuauggcuu

SEQ ID NO: 11660 - RNA, 19 nt, artificial
  Oligomer
aggauuuucacuucaugcu

SEQ ID NO: 11661 - RNA, 19 nt, artificial
  Oligomer
ugggaggauuuucacuuca

SEQ ID NO: 11662 - RNA, 19 nt, artificial
  Oligomer
ccagagagaaaggugagag

SEQ ID NO: 11663 - RNA, 19 nt, artificial
  Oligomer
gcuguuuaguucugaagag

SEQ ID NO: 11664 - RNA, 19 nt, artificial
  Oligomer
gucaaccucauccugucca

SEQ ID NO: 11665 - RNA, 19 nt, artificial
  Oligomer
cgagaacacaagaagcuac

SEQ ID NO: 11666 - RNA, 19 nt, artificial
  Oligomer
ccaaugucuuugucuggca

SEQ ID NO: 11667 - RNA, 19 nt, artificial
  Oligomer
acauccgaaauaccacccu

SEQ ID NO: 11668 - RNA, 19 nt, artificial
  Oligomer
gaagcaaagauuuuaagag

SEQ ID NO: 11669 - RNA, 19 nt, artificial
  Oligomer
cacagaagcaaagauuuua

SEQ ID NO: 11670 - RNA, 19 nt, artificial
  Oligomer
gugaucucaacccuaaugu

SEQ ID NO: 11671 - RNA, 19 nt, artificial
  Oligomer
ggcaaauucucccguacag

SEQ ID NO: 11672 - RNA, 19 nt, artificial
  Oligomer
acuacuggauucgggagaa

SEQ ID NO: 11673 - RNA, 19 nt, artificial
  Oligomer
ucugcaacaacuacuggau

SEQ ID NO: 11674 - RNA, 19 nt, artificial
  Oligomer
agggucugcaacaacuacu

SEQ ID NO: 11675 - RNA, 19 nt, artificial
  Oligomer
cucagggucugcaacaacu

SEQ ID NO: 11676 - RNA, 19 nt, artificial
  Oligomer
cccuggugucuacaugaga

SEQ ID NO: 11677 - RNA, 19 nt, artificial
  Oligomer
gcugagcuguaaaauauuu

SEQ ID NO: 11678 - RNA, 19 nt, artificial
  Oligomer
uccauacucagcucuuuaa

SEQ ID NO: 11679 - RNA, 19 nt, artificial
  Oligomer
ucgaugcguugcuuuggua

SEQ ID NO: 11680 - RNA, 19 nt, artificial
  Oligomer
gugaaaagguacaauagug

SEQ ID NO: 11681 - RNA, 19 nt, artificial
  Oligomer
ggugaaaagguacaauagu

SEQ ID NO: 11682 - RNA, 19 nt, artificial
  Oligomer
uccaucagaauccaccuua

SEQ ID NO: 11683 - RNA, 19 nt, artificial
  Oligomer
ccacuucaugcaccacuau

SEQ ID NO: 11684 - RNA, 19 nt, artificial
  Oligomer
gaaugaccaagaauguaga

SEQ ID NO: 11685 - RNA, 19 nt, artificial
  Oligomer
ccaaaugcuguguaagaag

SEQ ID NO: 11686 - RNA, 19 nt, artificial
  Oligomer
caauggcugugcuggauac

SEQ ID NO: 11687 - RNA, 19 nt, artificial
  Oligomer
caaucaucuauggagguga

SEQ ID NO: 11688 - RNA, 19 nt, artificial
  Oligomer
ggcaaucaucuauggaggu

SEQ ID NO: 11689 - RNA, 19 nt, artificial
  Oligomer
cggcaaucaucuauggagg

SEQ ID NO: 11690 - RNA, 19 nt, artificial
  Oligomer
cccacuuuccacaucuacu

SEQ ID NO: 11691 - RNA, 19 nt, artificial
  Oligomer
ucauaaccuuccugcgaga

SEQ ID NO: 11692 - RNA, 19 nt, artificial
  Oligomer
gcugacaugggaggauuuu

SEQ ID NO: 11693 - RNA, 19 nt, artificial
  Oligomer
ccaaggacgaauucuucac

SEQ ID NO: 11694 - RNA, 19 nt, artificial
  Oligomer
ccgucuaauguuuaccaug

SEQ ID NO: 11695 - RNA, 19 nt, artificial
  Oligomer
guuuaguucugaagaggaa

SEQ ID NO: 11696 - RNA, 19 nt, artificial
  Oligomer
gcugcuguuuaguucugaa

SEQ ID NO: 11697 - RNA, 19 nt, artificial
  Oligomer
ugcugcucaagaucccuaa

SEQ ID NO: 11698 - RNA, 19 nt, artificial
  Oligomer
uuaagaggaaagaagacau

SEQ ID NO: 11699 - RNA, 19 nt, artificial
  Oligomer
gcagcccaaugucuuuguc

SEQ ID NO: 11700 - RNA, 19 nt, artificial
  Oligomer
cagaagcaaagauuuuaag

SEQ ID NO: 11701 - RNA, 19 nt, artificial
  Oligomer
ccuccauacucagcucuuu

SEQ ID NO: 11702 - RNA, 19 nt, artificial
  Oligomer
cccuccauacucagcucuu

SEQ ID NO: 11703 - RNA, 19 nt, artificial
  Oligomer
cagauauucaguacucgau

SEQ ID NO: 11704 - RNA, 19 nt, artificial
  Oligomer
cagcccugauauucuugau

SEQ ID NO: 11705 - RNA, 19 nt, artificial
  Oligomer
ccagcccugauauucuuga

SEQ ID NO: 11706 - RNA, 19 nt, artificial
  Oligomer
gagggcaccaggaaacaaa

SEQ ID NO: 11707 - RNA, 19 nt, artificial
  Oligomer
cgaugcguugcuuugguau

SEQ ID NO: 11708 - RNA, 19 nt, artificial
  Oligomer
guguggaggugaaaaggua

SEQ ID NO: 11709 - RNA, 19 nt, artificial
  Oligomer
caaagaagauaaagaccac

SEQ ID NO: 11710 - RNA, 19 nt, artificial
  Oligomer
gcaugaugauuauaagucc

SEQ ID NO: 11711 - RNA, 19 nt, artificial
  Oligomer
ugcaccacuaugagaacuu

SEQ ID NO: 11712 - RNA, 19 nt, artificial
  Oligomer
uggcauaaauuugaggugu

SEQ ID NO: 11713 - RNA, 19 nt, artificial
  Oligomer
ucgccaccuaccagaacau

SEQ ID NO: 11714 - RNA, 19 nt, artificial
  Oligomer
ggaguggcauaaauuugag

SEQ ID NO: 11715 - RNA, 19 nt, artificial
  Oligomer
cugcccacuuuccacaucu

SEQ ID NO: 11716 - RNA, 19 nt, artificial
  Oligomer
ucuaugcccugcucaucau

SEQ ID NO: 11717 - RNA, 19 nt, artificial
  Oligomer
accucuacauccugcucua

SEQ ID NO: 11718 - RNA, 19 nt, artificial
  Oligomer
ccaucauguaugucuucgc

SEQ ID NO: 11719 - RNA, 19 nt, artificial
  Oligomer
ggccaucauguaugucuuc

SEQ ID NO: 11720 - RNA, 19 nt, artificial
  Oligomer
cuggccaucauguaugucu

SEQ ID NO: 11721 - RNA, 19 nt, artificial
  Oligomer
guccuggccaucauguaug

SEQ ID NO: 11722 - RNA, 19 nt, artificial
  Oligomer
gguccuggccaucauguau

SEQ ID NO: 11723 - RNA, 19 nt, artificial
  Oligomer
gaaguucuauuggugguuc

SEQ ID NO: 11724 - RNA, 19 nt, artificial
  Oligomer
ccuuccugcgagagacuuu

SEQ ID NO: 11725 - RNA, 19 nt, artificial
  Oligomer
cucauaaccuuccugcgag

SEQ ID NO: 11726 - RNA, 19 nt, artificial
  Oligomer
cgcaaccucauaaccuucc

SEQ ID NO: 11727 - RNA, 19 nt, artificial
  Oligomer
ccgcaaccucauaaccuuc

SEQ ID NO: 11728 - RNA, 19 nt, artificial
  Oligomer
cuccuucauguucucuuau

SEQ ID NO: 11729 - RNA, 19 nt, artificial
  Oligomer
gcuuacuacuauggcuuug

SEQ ID NO: 11730 - RNA, 19 nt, artificial
  Oligomer
ugcuuacuacuauggcuuu

SEQ ID NO: 11731 - RNA, 19 nt, artificial
  Oligomer
cgugcuuacuacuauggcu

SEQ ID NO: 11732 - RNA, 19 nt, artificial
  Oligomer
gaagagguuuggcaaaaag

SEQ ID NO: 11733 - RNA, 19 nt, artificial
  Oligomer
agguggaaaugguauuaga

SEQ ID NO: 11734 - RNA, 19 nt, artificial
  Oligomer
gagguggaaaugguauuag

SEQ ID NO: 11735 - RNA, 19 nt, artificial
  Oligomer
guaugaccuggaugagaau

SEQ ID NO: 11736 - RNA, 19 nt, artificial
  Oligomer
ucccgucuaauguuuacca

SEQ ID NO: 11737 - RNA, 19 nt, artificial
  Oligomer
uggcugacaaggauggcaa

SEQ ID NO: 11738 - RNA, 19 nt, artificial
  Oligomer
aacacaagaagcuacaaaa

SEQ ID NO: 11739 - RNA, 19 nt, artificial
  Oligomer
agaacacaagaagcuacaa

SEQ ID NO: 11740 - RNA, 19 nt, artificial
  Oligomer
gccgagaacacaagaagcu

SEQ ID NO: 11741 - RNA, 19 nt, artificial
  Oligomer
auugaagacauccgaaaua

SEQ ID NO: 11742 - RNA, 19 nt, artificial
  Oligomer
ccuguucagugccauuguc

SEQ ID NO: 11743 - RNA, 19 nt, artificial
  Oligomer
ggacaacauagugguugaa

SEQ ID NO: 11744 - RNA, 19 nt, artificial
  Oligomer
gcaagaaguagagcacaga

SEQ ID NO: 11745 - RNA, 19 nt, artificial
  Oligomer
ggcaagaaguagagcacag

SEQ ID NO: 11746 - RNA, 19 nt, artificial
  Oligomer
ccaaucugaacaguaccca

SEQ ID NO: 11747 - RNA, 19 nt, artificial
  Oligomer
gguuuucaaagcucccaag

SEQ ID NO: 11748 - RNA, 19 nt, artificial
  Oligomer
acaaggguuuucaaagcuc

SEQ ID NO: 11749 - RNA, 19 nt, artificial
  Oligomer
agaaaugccagcugucauu

SEQ ID NO: 11750 - RNA, 19 nt, artificial
  Oligomer
uggugucuacaugagaaau

SEQ ID NO: 11751 - RNA, 19 nt, artificial
  Oligomer
gucaagacauagaauguuu

SEQ ID NO: 11752 - RNA, 19 nt, artificial
  Oligomer
ggucaagacauagaauguu

SEQ ID NO: 11753 - RNA, 19 nt, artificial
  Oligomer
ccauacucagcucuuuaac

SEQ ID NO: 11754 - RNA, 19 nt, artificial
  Oligomer
ugagggugaaggcaagaag

SEQ ID NO: 11755 - RNA, 19 nt, artificial
  Oligomer
gggcaccaggaaacaaaga

SEQ ID NO: 11756 - RNA, 19 nt, artificial
  Oligomer
gugagggugaaggcaagaa

SEQ ID NO: 11757 - RNA, 19 nt, artificial
  Oligomer
ggacugacauuugagggag

SEQ ID NO: 11758 - RNA, 19 nt, artificial
  Oligomer
caaguguggaggugaaaag

SEQ ID NO: 11759 - RNA, 19 nt, artificial
  Oligomer
gacaaguguggaggugaaa

SEQ ID NO: 11760 - RNA, 19 nt, artificial
  Oligomer
agaaaaggcaggagacuau

SEQ ID NO: 11761 - RNA, 19 nt, artificial
  Oligomer
cuccaucagaauccaccuu

SEQ ID NO: 11762 - RNA, 19 nt, artificial
  Oligomer
acauuuaugucacccagcu

SEQ ID NO: 11763 - RNA, 19 nt, artificial
  Oligomer
uggucuucaagucauccuu

SEQ ID NO: 11764 - RNA, 19 nt, artificial
  Oligomer
cuggaagagugagggugaa

SEQ ID NO: 11765 - RNA, 19 nt, artificial
  Oligomer
ucaucuauggaggugacaa

SEQ ID NO: 11766 - RNA, 19 nt, artificial
  Oligomer
ugacccaccaccucuacau

SEQ ID NO: 11767 - RNA, 19 nt, artificial
  Oligomer
ccauguucuuuccgacgug

SEQ ID NO: 11768 - RNA, 19 nt, artificial
  Oligomer
caaccgcuaugugccuuuu

SEQ ID NO: 11769 - RNA, 19 nt, artificial
  Oligomer
gacuuuccucaaccgcuau

SEQ ID NO: 11770 - RNA, 19 nt, artificial
  Oligomer
caaccucauaaccuuccug

SEQ ID NO: 11771 - RNA, 19 nt, artificial
  Oligomer
ucuccuucauguucucuua

SEQ ID NO: 11772 - RNA, 19 nt, artificial
  Oligomer
gucuccuucauguucucuu

SEQ ID NO: 11773 - RNA, 19 nt, artificial
  Oligomer
ccagcgucuccuucauguu

SEQ ID NO: 11774 - RNA, 19 nt, artificial
  Oligomer
caugggaggauuuucacuu

SEQ ID NO: 11775 - RNA, 19 nt, artificial
  Oligomer
agcugacaugggaggauuu

SEQ ID NO: 11776 - RNA, 19 nt, artificial
  Oligomer
gcuaugacggcugguuuaa

SEQ ID NO: 11777 - RNA, 19 nt, artificial
  Oligomer
gucccaucaucauccagcu

SEQ ID NO: 11778 - RNA, 19 nt, artificial
  Oligomer
caaaagaaacucaaagaga

SEQ ID NO: 11779 - RNA, 19 nt, artificial
  Oligomer
acacaagaagcuacaaaag

SEQ ID NO: 11780 - RNA, 19 nt, artificial
  Oligomer
gagaacacaagaagcuaca

SEQ ID NO: 11781 - RNA, 19 nt, artificial
  Oligomer
ccgagaacacaagaagcua

SEQ ID NO: 11782 - RNA, 19 nt, artificial
  Oligomer
gacugugcuugacuucuuu

SEQ ID NO: 11783 - RNA, 19 nt, artificial
  Oligomer
caaugucuuugucuggcau

SEQ ID NO: 11784 - RNA, 19 nt, artificial
  Oligomer
cccuguucagugccauugu

SEQ ID NO: 11785 - RNA, 19 nt, artificial
  Oligomer
cuaaaaagcugagcuguaa

SEQ ID NO: 11786 - RNA, 19 nt, artificial
  Oligomer
ugcaucuacuggagugguc

SEQ ID NO: 11787 - RNA, 19 nt, artificial
  Oligomer
ccucucugcaucuacugga

SEQ ID NO: 11788 - RNA, 19 nt, artificial
  Oligomer
ugcguugcuuugguauuug

SEQ ID NO: 11789 - RNA, 19 nt, artificial
  Oligomer
guggaggugaaaagguaca

SEQ ID NO: 11790 - RNA, 19 nt, artificial
  Oligomer
acaaguguggaggugaaaa

SEQ ID NO: 11791 - RNA, 19 nt, artificial
  Oligomer
ugcaugaugauuauaaguc

SEQ ID NO: 11792 - RNA, 19 nt, artificial
  Oligomer
agugcaugaugauuauaag

SEQ ID NO: 11793 - RNA, 19 nt, artificial
  Oligomer
caaaugagaaaaggcagga

SEQ ID NO: 11794 - RNA, 19 nt, artificial
  Oligomer
ugccuucucuucugugcac

SEQ ID NO: 11795 - RNA, 19 nt, artificial
  Oligomer
ccacuaugagaacuucuga

SEQ ID NO: 11796 - RNA, 19 nt, artificial
  Oligomer
agaauguagagaaggccug

SEQ ID NO: 11797 - RNA, 19 nt, artificial
  Oligomer
acaucgcuguguaugagug

SEQ ID NO: 11798 - RNA, 19 nt, artificial
  Oligomer
guggcauaaauuugaggug

SEQ ID NO: 11799 - RNA, 19 nt, artificial
  Oligomer
gagugaccuaccugcaauu

SEQ ID NO: 11800 - RNA, 19 nt, artificial
  Oligomer
ccucuacauccugcucuau

SEQ ID NO: 11801 - RNA, 19 nt, artificial
  Oligomer
gccaucauguaugucuucg

SEQ ID NO: 11802 - RNA, 19 nt, artificial
  Oligomer
agguaugacaggugugcuu

SEQ ID NO: 11803 - RNA, 19 nt, artificial
  Oligomer
cagaaguucuauugguggu

SEQ ID NO: 11804 - RNA, 19 nt, artificial
  Oligomer
ucuuauaucuugcucacca

SEQ ID NO: 11805 - RNA, 19 nt, artificial
  Oligomer
cagaucgugcuuacuacua

SEQ ID NO: 11806 - RNA, 19 nt, artificial
  Oligomer
gcaaucuucucggccaucu

SEQ ID NO: 11807 - RNA, 19 nt, artificial
  Oligomer
aggcgcugcaagagaagau

SEQ ID NO: 11808 - RNA, 19 nt, artificial
  Oligomer
cagagagaaaggugagagu

SEQ ID NO: 11809 - RNA, 19 nt, artificial
  Oligomer
uguucucucuggcugacaa

SEQ ID NO: 11810 - RNA, 19 nt, artificial
  Oligomer
acauguuuguggaguccau

SEQ ID NO: 11811 - RNA, 19 nt, artificial
  Oligomer
cugcuguuuaguucugaag

SEQ ID NO: 11812 - RNA, 19 nt, artificial
  Oligomer
gaaggcaagaaguagagca

SEQ ID NO: 11813 - RNA, 19 nt, artificial
  Oligomer
agggugaaggcaagaagua

SEQ ID NO: 11814 - RNA, 19 nt, artificial
  Oligomer
ccuagaagcaaccacugau

SEQ ID NO: 11815 - RNA, 19 nt, artificial
  Oligomer
aagcugagcuguaaaauau

SEQ ID NO: 11816 - RNA, 19 nt, artificial
  Oligomer
cugauauucuugaugucac

SEQ ID NO: 11817 - RNA, 19 nt, artificial
  Oligomer
agcccugauauucuugaug

SEQ ID NO: 11818 - RNA, 19 nt, artificial
  Oligomer
cugugaugcuuagaaccug

SEQ ID NO: 11819 - RNA, 19 nt, artificial
  Oligomer
augcguugcuuugguauuu

SEQ ID NO: 11820 - RNA, 19 nt, artificial
  Oligomer
caggagacuauguucuaca

SEQ ID NO: 11821 - RNA, 19 nt, artificial
  Oligomer
ucgcuguguaugaguggcu

SEQ ID NO: 11822 - RNA, 19 nt, artificial
  Oligomer
ucauguaugucuucgccuc

SEQ ID NO: 11823 - RNA, 19 nt, artificial
  Oligomer
cagucaaugucuacaucuu

SEQ ID NO: 11824 - RNA, 19 nt, artificial
  Oligomer
acgguguguaucaggcucu

SEQ ID NO: 11825 - RNA, 19 nt, artificial
  Oligomer
acaagcgcuucguggagaa

SEQ ID NO: 11826 - RNA, 19 nt, artificial
  Oligomer
caagagaagaugcagcgag

SEQ ID NO: 11827 - RNA, 19 nt, artificial
  Oligomer
ggacugaagaagagguuug

SEQ ID NO: 11828 - RNA, 19 nt, artificial
  Oligomer
accuggugcugcuguuuag

SEQ ID NO: 11829 - RNA, 19 nt, artificial
  Oligomer
ugaccuggugcugcuguuu

SEQ ID NO: 11830 - RNA, 19 nt, artificial
  Oligomer
ucaccaucauugcucucug

SEQ ID NO: 11831 - RNA, 19 nt, artificial
  Oligomer
gccaucaccaucauugcuc

SEQ ID NO: 11832 - RNA, 19 nt, artificial
  Oligomer
gucuuugucuggcauaaag

SEQ ID NO: 11833 - RNA, 19 nt, artificial
  Oligomer
agcccaaugucuuugucug

SEQ ID NO: 11834 - RNA, 19 nt, artificial
  Oligomer
gcaaauucucccguacaga

SEQ ID NO: 11835 - RNA, 19 nt, artificial
  Oligomer
caagaaguagagcacagaa

SEQ ID NO: 11836 - RNA, 19 nt, artificial
  Oligomer
caggucaagacauagaaug

SEQ ID NO: 11837 - RNA, 19 nt, artificial
  Oligomer
agcugagcuguaaaauauu

SEQ ID NO: 11838 - RNA, 19 nt, artificial
  Oligomer
ccuaaaaagcugagcugua

SEQ ID NO: 11839 - RNA, 19 nt, artificial
  Oligomer
cuccauacucagcucuuua

SEQ ID NO: 11840 - RNA, 19 nt, artificial
  Oligomer
ugcuuggacugacauuuga

SEQ ID NO: 11841 - RNA, 19 nt, artificial
  Oligomer
gcuuugguauuugcuugga

SEQ ID NO: 11842 - RNA, 19 nt, artificial
  Oligomer
aaaagguacaauagugcuu

SEQ ID NO: 11843 - RNA, 19 nt, artificial
  Oligomer
accacuaugagaacuucug

SEQ ID NO: 11844 - RNA, 19 nt, artificial
  Oligomer
ccuucuucaacucccugca

SEQ ID NO: 11845 - RNA, 19 nt, artificial
  Oligomer
cuggucuucaagucauccu

SEQ ID NO: 11846 - RNA, 19 nt, artificial
  Oligomer
ugaccuaccugcaauucca

SEQ ID NO: 11847 - RNA, 19 nt, artificial
  Oligomer
ucucuuauaucuugcucac

SEQ ID NO: 11848 - RNA, 19 nt, artificial
  Oligomer
ucguguguguggcaaucuu

SEQ ID NO: 11849 - RNA, 19 nt, artificial
  Oligomer
aagaagagguuuggcaaaa

SEQ ID NO: 11850 - RNA, 19 nt, artificial
  Oligomer
gaagaagagguuuggcaaa

SEQ ID NO: 11851 - RNA, 19 nt, artificial
  Oligomer
cugugucaaagguggaggu

SEQ ID NO: 11852 - RNA, 19 nt, artificial
  Oligomer
cugguggucuucaugaaag

SEQ ID NO: 11853 - RNA, 19 nt, artificial
  Oligomer
cuggugcugcuguuuaguu

SEQ ID NO: 11854 - RNA, 19 nt, artificial
  Oligomer
guuuugccaucaccaucau

SEQ ID NO: 11855 - RNA, 19 nt, artificial
  Oligomer
ugcagcccaaugucuuugu

SEQ ID NO: 11856 - RNA, 19 nt, artificial
  Oligomer
agauuucggaguuggagga

SEQ ID NO: 11857 - RNA, 19 nt, artificial
  Oligomer
cccaaucugaacaguaccc

SEQ ID NO: 11858 - RNA, 19 nt, artificial
  Oligomer
cuagaagcaaccacugaug

SEQ ID NO: 11859 - RNA, 19 nt, artificial
  Oligomer
ucaagacauagaauguuuc

SEQ ID NO: 11860 - RNA, 19 nt, artificial
  Oligomer
gugaugcuuagaaccugga

SEQ ID NO: 11861 - RNA, 19 nt, artificial
  Oligomer
cacuaugagaacuucugag

SEQ ID NO: 11862 - RNA, 19 nt, artificial
  Oligomer
cuauggaggugacaagcug

SEQ ID NO: 11863 - RNA, 19 nt, artificial
  Oligomer
caccucuacauccugcucu

SEQ ID NO: 11864 - RNA, 19 nt, artificial
  Oligomer
accauguucuuuccgacgu

SEQ ID NO: 11865 - RNA, 19 nt, artificial
  Oligomer
agagaaaggugagagugca

SEQ ID NO: 11866 - RNA, 19 nt, artificial
  Oligomer
acaucguguguguggcaau

SEQ ID NO: 11867 - RNA, 19 nt, artificial
  Oligomer
gagucuauguuccgggagu

SEQ ID NO: 11868 - RNA, 19 nt, artificial
  Oligomer
guggucuucaugaaaggcu

SEQ ID NO: 11869 - RNA, 19 nt, artificial
  Oligomer
uguuuguggaguccauguu

SEQ ID NO: 11870 - RNA, 19 nt, artificial
  Oligomer
cagacaccuuuuugcucag

SEQ ID NO: 11871 - RNA, 19 nt, artificial
  Oligomer
ucagacaccuuuuugcuca

SEQ ID NO: 11872 - RNA, 19 nt, artificial
  Oligomer
gccuucccuuagugagucu

SEQ ID NO: 11873 - RNA, 19 nt, artificial
  Oligomer
cugugcuugacuucuuuga

SEQ ID NO: 11874 - RNA, 19 nt, artificial
  Oligomer
cucccguacagacuaugug

SEQ ID NO: 11875 - RNA, 19 nt, artificial
  Oligomer
ccagauuucggaguuggag

SEQ ID NO: 11876 - RNA, 19 nt, artificial
  Oligomer
gagaaaugccagcugucau

SEQ ID NO: 11877 - RNA, 19 nt, artificial
  Oligomer
aaaaagcugagcuguaaaa

SEQ ID NO: 11878 - RNA, 19 nt, artificial
  Oligomer
cuugaugucaccagugaua

SEQ ID NO: 11879 - RNA, 19 nt, artificial
  Oligomer
ccugauauucuugauguca

SEQ ID NO: 11880 - RNA, 19 nt, artificial
  Oligomer
uggacugacauuugaggga

SEQ ID NO: 11881 - RNA, 19 nt, artificial
  Oligomer
guauuugcuuggacugaca

SEQ ID NO: 11882 - RNA, 19 nt, artificial
  Oligomer
aaguccaccuguuuaucaa

SEQ ID NO: 11883 - RNA, 19 nt, artificial
  Oligomer
agagugagggugaaggcaa

SEQ ID NO: 11884 - RNA, 19 nt, artificial
  Oligomer
ugauuauaaguccaccugu

SEQ ID NO: 11885 - RNA, 19 nt, artificial
  Oligomer
cuucucuucugugcaccua

SEQ ID NO: 11886 - RNA, 19 nt, artificial
  Oligomer
agcccuucuucaacucccu

SEQ ID NO: 11887 - RNA, 19 nt, artificial
  Oligomer
agaaagugcugaaccggag

SEQ ID NO: 11888 - RNA, 19 nt, artificial
  Oligomer
ccuuugccuccauccucaa

SEQ ID NO: 11889 - RNA, 19 nt, artificial
  Oligomer
ccuugauggaccguuugga

SEQ ID NO: 11890 - RNA, 19 nt, artificial
  Oligomer
cuaccauguucuuuccgac

SEQ ID NO: 11891 - RNA, 19 nt, artificial
  Oligomer
gcuaccauguucuuuccga

SEQ ID NO: 11892 - RNA, 19 nt, artificial
  Oligomer
uugugaaugauggguccaa

SEQ ID NO: 11893 - RNA, 19 nt, artificial
  Oligomer
guguguaucaggcucugga

SEQ ID NO: 11894 - RNA, 19 nt, artificial
  Oligomer
gcugucgagucucguucau

SEQ ID NO: 11895 - RNA, 19 nt, artificial
  Oligomer
uggucuucaugaaaggcuc

SEQ ID NO: 11896 - RNA, 19 nt, artificial
  Oligomer
ccaggacauguuuguggag

SEQ ID NO: 11897 - RNA, 19 nt, artificial
  Oligomer
uggugcugcuguuuaguuc

SEQ ID NO: 11898 - RNA, 19 nt, artificial
  Oligomer
ucauugcucucugcugccu

SEQ ID NO: 11899 - RNA, 19 nt, artificial
  Oligomer
ugucuuugucuggcauaaa

SEQ ID NO: 11900 - RNA, 19 nt, artificial
  Oligomer
augucuuugucuggcauaa

SEQ ID NO: 11901 - RNA, 19 nt, artificial
  Oligomer
ccugcagcccaaugucuuu

SEQ ID NO: 11902 - RNA, 19 nt, artificial
  Oligomer
aggaggugaaugagcugcu

SEQ ID NO: 11903 - RNA, 19 nt, artificial
  Oligomer
cagcugucauuuccggaag

SEQ ID NO: 11904 - RNA, 19 nt, artificial
  Oligomer
ucgggcucuuuccuaaaaa

SEQ ID NO: 11905 - RNA, 19 nt, artificial
  Oligomer
gguauuugcuuggacugac

SEQ ID NO: 11906 - RNA, 19 nt, artificial
  Oligomer
aaaggcaggagacuauguu

SEQ ID NO: 11907 - RNA, 19 nt, artificial
  Oligomer
ggagaauauugacccagac

SEQ ID NO: 11908 - RNA, 19 nt, artificial
  Oligomer
ugaagaagagguuuggcaa

SEQ ID NO: 11909 - RNA, 19 nt, artificial
  Oligomer
cugaagaagagguuuggca

SEQ ID NO: 11910 - RNA, 19 nt, artificial
  Oligomer
ggagcucuucugacuggau

SEQ ID NO: 11911 - RNA, 19 nt, artificial
  Oligomer
caggacauguuuguggagu

SEQ ID NO: 11912 - RNA, 19 nt, artificial
  Oligomer
ggaauuugugguggccucu

SEQ ID NO: 11913 - RNA, 19 nt, artificial
  Oligomer
aggcaggagacuauguucu

SEQ ID NO: 11914 - RNA, 19 nt, artificial
  Oligomer
gagaacuucugagccuguc

SEQ ID NO: 11915 - RNA, 19 nt, artificial
  Oligomer
uggagaucagcguggugaa

SEQ ID NO: 11916 - RNA, 19 nt, artificial
  Oligomer
acauugcacagaccacccu

SEQ ID NO: 11917 - RNA, 19 nt, artificial
  Oligomer
uggagguggagguggaaau

SEQ ID NO: 11918 - RNA, 19 nt, artificial
  Oligomer
cggaguuggaggacaacau

SEQ ID NO: 11919 - RNA, 19 nt, artificial
  Oligomer
uccacaaaaucgaugcguu

SEQ ID NO: 11920 - RNA, 19 nt, artificial
  Oligomer
gggagaauauugacccaga

SEQ ID NO: 11921 - RNA, 19 nt, artificial
  Oligomer
ccaggaaugaccaagaaug

SEQ ID NO: 11922 - RNA, 19 nt, artificial
  Oligomer
ucguucaucacucggacac

SEQ ID NO: 11923 - RNA, 19 nt, artificial
  Oligomer
gguggagguggaaauggua

SEQ ID NO: 11924 - RNA, 19 nt, artificial
  Oligomer
gcaauggcuaccuguccuu

SEQ ID NO: 11925 - RNA, 19 nt, artificial
  Oligomer
aggaaagaagacaucugaa

SEQ ID NO: 11926 - RNA, 19 nt, artificial
  Oligomer
cuggagugguggccuauuu

SEQ ID NO: 11927 - RNA, 19 nt, artificial
  Oligomer
agaggaaagaagacaucug

SEQ ID NO: 11928 - RNA, 19 nt, artificial
  Oligomer
ggaacuggagugaucucaa

SEQ ID NO: 11929 - RNA, 19 nt, artificial
  Oligomer
ggaguuggaggacaacaua

SEQ ID NO: 11930 - RNA, 19 nt, artificial
  Oligomer
ccagugcagaagcugugau

SEQ ID NO: 11931 - RNA, 19 nt, artificial
  Oligomer
ccagucaggaucucccaaa

SEQ ID NO: 11932 - RNA, 19 nt, artificial
  Oligomer
gcacauuuaugucacccag

SEQ ID NO: 11933 - RNA, 19 nt, artificial
  Oligomer
ggcagccaaaugcugugua

SEQ ID NO: 11934 - RNA, 19 nt, artificial
  Oligomer
gaguacaagucaggacagu

SEQ ID NO: 11935 - RNA, 19 nt, artificial
  Oligomer
cccaaggcuuugaguacaa

SEQ ID NO: 11936 - RNA, 19 nt, artificial
  Oligomer
cgcagucaaugucuacauc

SEQ ID NO: 11937 - RNA, 19 nt, artificial
  Oligomer
acgcagucaaugucuacau

SEQ ID NO: 11938 - RNA, 19 nt, artificial
  Oligomer
agguggagguggaaauggu

SEQ ID NO: 11939 - RNA, 19 nt, artificial
  Oligomer
ugccuucccuuagugaguc

SEQ ID NO: 11940 - RNA, 19 nt, artificial
  Oligomer
ccaguuuugguccuacuaa

SEQ ID NO: 11941 - RNA, 19 nt, artificial
  Oligomer
aucgggcucuuuccuaaaa

SEQ ID NO: 11942 - RNA, 19 nt, artificial
  Oligomer
cucugccagauauucagua

SEQ ID NO: 11943 - RNA, 19 nt, artificial
  Oligomer
aaaaggagcagcccuacuu

SEQ ID NO: 11944 - RNA, 19 nt, artificial
  Oligomer
ggaguauacaggauaccgu

SEQ ID NO: 11945 - RNA, 19 nt, artificial
  Oligomer
gcagucaaugucuacaucu

SEQ ID NO: 11946 - RNA, 19 nt, artificial
  Oligomer
gcagcucugugucaaaggu

SEQ ID NO: 11947 - RNA, 19 nt, artificial
  Oligomer
cuucuucagacaccuuuuu

SEQ ID NO: 11948 - RNA, 19 nt, artificial
  Oligomer
cugcugcucaagaucccua

SEQ ID NO: 11949 - RNA, 19 nt, artificial
  Oligomer
ggucgcuguuaucaacauu

SEQ ID NO: 11950 - RNA, 19 nt, artificial
  Oligomer
uccggaagguccugaacaa

SEQ ID NO: 11951 - RNA, 19 nt, artificial
  Oligomer
ggugaaggcaagaaguaga

SEQ ID NO: 11952 - RNA, 19 nt, artificial
  Oligomer
caaauccaguuuugguccu

SEQ ID NO: 11953 - RNA, 19 nt, artificial
  Oligomer
ugaugugauuucuaccaaa

SEQ ID NO: 11954 - RNA, 19 nt, artificial
  Oligomer
guacauguuuuaccaccac

SEQ ID NO: 11955 - RNA, 19 nt, artificial
  Oligomer
ucagcucuuuaacuuuucu

SEQ ID NO: 11956 - RNA, 19 nt, artificial
  Oligomer
ggaucucccaaagaagaua

SEQ ID NO: 11957 - RNA, 19 nt, artificial
  Oligomer
cccggaguauacaggauac

SEQ ID NO: 11958 - RNA, 19 nt, artificial
  Oligomer
caauugcagugcaugauga

SEQ ID NO: 11959 - RNA, 19 nt, artificial
  Oligomer
uacaauugcagugcaugau

SEQ ID NO: 11960 - RNA, 19 nt, artificial
  Oligomer
uucuacaauugcagugcau

SEQ ID NO: 11961 - RNA, 19 nt, artificial
  Oligomer
agaaaacacucccggagua

SEQ ID NO: 11962 - RNA, 19 nt, artificial
  Oligomer
accagaacaucgcugugua

SEQ ID NO: 11963 - RNA, 19 nt, artificial
  Oligomer
ccgcuaugugccuuuugau

SEQ ID NO: 11964 - RNA, 19 nt, artificial
  Oligomer
ccaaaagcugcagcaguac

SEQ ID NO: 11965 - RNA, 19 nt, artificial
  Oligomer
gagcucuucugacuggauc

SEQ ID NO: 11966 - RNA, 19 nt, artificial
  Oligomer
cucaggugcuggacaucaa

SEQ ID NO: 11967 - RNA, 19 nt, artificial
  Oligomer
ugagcgagaaggagcuauu

SEQ ID NO: 11968 - RNA, 19 nt, artificial
  Oligomer
ccaucaccaucauugcucu

SEQ ID NO: 11969 - RNA, 19 nt, artificial
  Oligomer
acgugcuggucgcuguuau

SEQ ID NO: 11970 - RNA, 19 nt, artificial
  Oligomer
cgcuacugguuugagaaca

SEQ ID NO: 11971 - RNA, 19 nt, artificial
  Oligomer
aggacaacauagugguuga

SEQ ID NO: 11972 - RNA, 19 nt, artificial
  Oligomer
gugaaggcaagaaguagag

SEQ ID NO: 11973 - RNA, 19 nt, artificial
  Oligomer
agguccugaacaaggguuu

SEQ ID NO: 11974 - RNA, 19 nt, artificial
  Oligomer
aaauccaguuuugguccua

SEQ ID NO: 11975 - RNA, 19 nt, artificial
  Oligomer
cgggcucuuuccuaaaaag

SEQ ID NO: 11976 - RNA, 19 nt, artificial
  Oligomer
cagucaggaucucccaaag

SEQ ID NO: 11977 - RNA, 19 nt, artificial
  Oligomer
ccaauauugggagaauauu

SEQ ID NO: 11978 - RNA, 19 nt, artificial
  Oligomer
cccaauauugggagaauau

SEQ ID NO: 11979 - RNA, 19 nt, artificial
  Oligomer
gcuuccaguauccugccuu

SEQ ID NO: 11980 - RNA, 19 nt, artificial
  Oligomer
ccaccaugcuauacaucug

SEQ ID NO: 11981 - RNA, 19 nt, artificial
  Oligomer
gcagccaaaugcuguguaa

SEQ ID NO: 11982 - RNA, 19 nt, artificial
  Oligomer
ucaaccgcuaugugccuuu

SEQ ID NO: 11983 - RNA, 19 nt, artificial
  Oligomer
gcgucuccuucauguucuc

SEQ ID NO: 11984 - RNA, 19 nt, artificial
  Oligomer
cuggacugaagaagagguu

SEQ ID NO: 11985 - RNA, 19 nt, artificial
  Oligomer
aggugguggagucuauguu

SEQ ID NO: 11986 - RNA, 19 nt, artificial
  Oligomer
ggaugagaauggcuuccuc

SEQ ID NO: 11987 - RNA, 19 nt, artificial
  Oligomer
uaccauguaugaccuggau

SEQ ID NO: 11988 - RNA, 19 nt, artificial
  Oligomer
ugcagcaggucaaccucau

SEQ ID NO: 11989 - RNA, 19 nt, artificial
  Oligomer
agcuacaaaagaaacucaa

SEQ ID NO: 11990 - RNA, 19 nt, artificial
  Oligomer
gagucugcuucucucugga

SEQ ID NO: 11991 - RNA, 19 nt, artificial
  Oligomer
ccucaaccuaagcagcuca

SEQ ID NO: 11992 - RNA, 19 nt, artificial
  Oligomer
gguuugagaacaccaggaa

SEQ ID NO: 11993 - RNA, 19 nt, artificial
  Oligomer
ccuggcaaauucucccgua

SEQ ID NO: 11994 - RNA, 19 nt, artificial
  Oligomer
ggguuuucaaagcucccaa

SEQ ID NO: 11995 - RNA, 19 nt, artificial
  Oligomer
gaugugauuucuaccaaau

SEQ ID NO: 11996 - RNA, 19 nt, artificial
  Oligomer
cccaggucaagacauagaa

SEQ ID NO: 11997 - RNA, 19 nt, artificial
  Oligomer
cagcucuuuaacuuuucuu

SEQ ID NO: 11998 - RNA, 19 nt, artificial
  Oligomer
cucagcucuuuaacuuuuc

SEQ ID NO: 11999 - RNA, 19 nt, artificial
  Oligomer
acucagcucuuuaacuuuu

SEQ ID NO: 12000 - RNA, 19 nt, artificial
  Oligomer
gaagcugugaugcuuagaa

SEQ ID NO: 12001 - RNA, 19 nt, artificial
  Oligomer
cccagcuuccugcagaaaa

SEQ ID NO: 12002 - RNA, 19 nt, artificial
  Oligomer
cucaggaccaccaugcuau

SEQ ID NO: 12003 - RNA, 19 nt, artificial
  Oligomer
uggugucugugcacauuua

SEQ ID NO: 12004 - RNA, 19 nt, artificial
  Oligomer
ccagaacaucgcuguguau

SEQ ID NO: 12005 - RNA, 19 nt, artificial
  Oligomer
ucaggaguggcauaaauuu

SEQ ID NO: 12006 - RNA, 19 nt, artificial
  Oligomer
ccacaucuacuuccugguc

SEQ ID NO: 12007 - RNA, 19 nt, artificial
  Oligomer
gcagcuaugcucugaucca

SEQ ID NO: 12008 - RNA, 19 nt, artificial
  Oligomer
accgcuaugugccuuuuga

SEQ ID NO: 12009 - RNA, 19 nt, artificial
  Oligomer
gaggcuuccuagcccaaaa

SEQ ID NO: 12010 - RNA, 19 nt, artificial
  Oligomer
acaaggaggagcugacaug

SEQ ID NO: 12011 - RNA, 19 nt, artificial
  Oligomer
ccaacaacugccuguccaa

SEQ ID NO: 12012 - RNA, 19 nt, artificial
  Oligomer
agaauggcuuccucuccaa

SEQ ID NO: 12013 - RNA, 19 nt, artificial
  Oligomer
ccugguggucuucaugaaa

SEQ ID NO: 12014 - RNA, 19 nt, artificial
  Oligomer
ugcucaagaucccuaagga

SEQ ID NO: 12015 - RNA, 19 nt, artificial
  Oligomer
cuguccaacaaccgaggau

SEQ ID NO: 12016 - RNA, 19 nt, artificial
  Oligomer
caaccuaagcagcucacaa

SEQ ID NO: 12017 - RNA, 19 nt, artificial
  Oligomer
cucaaccuaagcagcucac

SEQ ID NO: 12018 - RNA, 19 nt, artificial
  Oligomer
agagcacagaagcaaagau

SEQ ID NO: 12019 - RNA, 19 nt, artificial
  Oligomer
acaacauagugguugaaga

SEQ ID NO: 12020 - RNA, 19 nt, artificial
  Oligomer
gaggacaacauagugguug

SEQ ID NO: 12021 - RNA, 19 nt, artificial
  Oligomer
guccugaacaaggguuuuc

SEQ ID NO: 12022 - RNA, 19 nt, artificial
  Oligomer
gguccugaacaaggguuuu

SEQ ID NO: 12023 - RNA, 19 nt, artificial
  Oligomer
gucuacaugagaaaugcca

SEQ ID NO: 12024 - RNA, 19 nt, artificial
  Oligomer
gcaccaggaaacaaagaug

SEQ ID NO: 12025 - RNA, 19 nt, artificial
  Oligomer
cagaagcugugaugcuuag

SEQ ID NO: 12026 - RNA, 19 nt, artificial
  Oligomer
gcagaagcugugaugcuua

SEQ ID NO: 12027 - RNA, 19 nt, artificial
  Oligomer
ccggaguauacaggauacc

SEQ ID NO: 12028 - RNA, 19 nt, artificial
  Oligomer
ucccggaguauacaggaua

SEQ ID NO: 12029 - RNA, 19 nt, artificial
  Oligomer
guucuacaauugcagugca

SEQ ID NO: 12030 - RNA, 19 nt, artificial
  Oligomer
ucccaauauugggagaaua

SEQ ID NO: 12031 - RNA, 19 nt, artificial
  Oligomer
cuccaggaaugaccaagaa

SEQ ID NO: 12032 - RNA, 19 nt, artificial
  Oligomer
ugcacauuuaugucaccca

SEQ ID NO: 12033 - RNA, 19 nt, artificial
  Oligomer
aggaguggcauaaauuuga

SEQ ID NO: 12034 - RNA, 19 nt, artificial
  Oligomer
ccacgcagucaaugucuac

SEQ ID NO: 12035 - RNA, 19 nt, artificial
  Oligomer
gccauuuugcacagugcug

SEQ ID NO: 12036 - RNA, 19 nt, artificial
  Oligomer
ugcgagagacuuuccucaa

SEQ ID NO: 12037 - RNA, 19 nt, artificial
  Oligomer
cccaaaagcugcagcagua

SEQ ID NO: 12038 - RNA, 19 nt, artificial
  Oligomer
gcugguuuaacaaccugag

SEQ ID NO: 12039 - RNA, 19 nt, artificial
  Oligomer
ugcgauccuucaucgagau

SEQ ID NO: 12040 - RNA, 19 nt, artificial
  Oligomer
aggacgaauucuucaccau

SEQ ID NO: 12041 - RNA, 19 nt, artificial
  Oligomer
agaggauaagucccgucua

SEQ ID NO: 12042 - RNA, 19 nt, artificial
  Oligomer
auuuguauaauugucuggg

SEQ ID NO: 12043 - RNA, 19 nt, artificial
  Oligomer
uuuguauaauugucugggu

SEQ ID NO: 12044 - RNA, 19 nt, artificial
  Oligomer
uuuuguggaagucaauuag

SEQ ID NO: 12045 - RNA, 19 nt, artificial
  Oligomer
uugucugggucaauauucu

SEQ ID NO: 12046 - RNA, 19 nt, artificial
  Oligomer
gaauugagaucgaguacug

SEQ ID NO: 12047 - RNA, 19 nt, artificial
  Oligomer
aauugagaucgaguacuga

SEQ ID NO: 12048 - RNA, 19 nt, artificial
  Oligomer
auugucugggucaauauuc

SEQ ID NO: 12049 - RNA, 19 nt, artificial
  Oligomer
aaguagauguggaaagugg

SEQ ID NO: 12050 - RNA, 19 nt, artificial
  Oligomer
augaagugaaaauccuccc

SEQ ID NO: 12051 - RNA, 19 nt, artificial
  Oligomer
agccuuccuaaauagcucc

SEQ ID NO: 12052 - RNA, 19 nt, artificial
  Oligomer
aguauauuuaguaggacca

SEQ ID NO: 12053 - RNA, 19 nt, artificial
  Oligomer
uuguggaagucaauuagag

SEQ ID NO: 12054 - RNA, 19 nt, artificial
  Oligomer
uagacauugacugcguggc

SEQ ID NO: 12055 - RNA, 19 nt, artificial
  Oligomer
ugguuuagggugguguugg

SEQ ID NO: 12056 - RNA, 19 nt, artificial
  Oligomer
aaccacuauguuguccucc

SEQ ID NO: 12057 - RNA, 19 nt, artificial
  Oligomer
aagagcccgaugaaaaagg

SEQ ID NO: 12058 - RNA, 19 nt, artificial
  Oligomer
auuguaccuuuucaccucc

SEQ ID NO: 12059 - RNA, 19 nt, artificial
  Oligomer
uacaugguaaacauuagac

SEQ ID NO: 12060 - RNA, 19 nt, artificial
  Oligomer
augguaaacauuagacggg

SEQ ID NO: 12061 - RNA, 19 nt, artificial
  Oligomer
uuguuggacaggaugaggu

SEQ ID NO: 12062 - RNA, 19 nt, artificial
  Oligomer
uuggacaggaugagguuga

SEQ ID NO: 12063 - RNA, 19 nt, artificial
  Oligomer
guguuggguucagaugucu

SEQ ID NO: 12064 - RNA, 19 nt, artificial
  Oligomer
uuuaguaggaccaaaacug

SEQ ID NO: 12065 - RNA, 19 nt, artificial
  Oligomer
ucgaguacugaauaucugg

SEQ ID NO: 12066 - RNA, 19 nt, artificial
  Oligomer
aaguugcugacacuuuggg

SEQ ID NO: 12067 - RNA, 19 nt, artificial
  Oligomer
uucucuacauucuugguca

SEQ ID NO: 12068 - RNA, 19 nt, artificial
  Oligomer
aaaauggccaggacaacag

SEQ ID NO: 12069 - RNA, 19 nt, artificial
  Oligomer
aagguuaugagguugcggc

SEQ ID NO: 12070 - RNA, 19 nt, artificial
  Oligomer
auauaagagaacaugaagg

SEQ ID NO: 12071 - RNA, 19 nt, artificial
  Oligomer
caugaagugaaaauccucc

SEQ ID NO: 12072 - RNA, 19 nt, artificial
  Oligomer
aucauggugaagaauucgu

SEQ ID NO: 12073 - RNA, 19 nt, artificial
  Oligomer
gaguacugaauaucuggca

SEQ ID NO: 12074 - RNA, 19 nt, artificial
  Oligomer
aucuuuguuuccuggugcc

SEQ ID NO: 12075 - RNA, 19 nt, artificial
  Oligomer
uauuguaccuuuucaccuc

SEQ ID NO: 12076 - RNA, 19 nt, artificial
  Oligomer
auagaugauugccgggacc

SEQ ID NO: 12077 - RNA, 19 nt, artificial
  Oligomer
uauaagagaacaugaagga

SEQ ID NO: 12078 - RNA, 19 nt, artificial
  Oligomer
guuggguucagaugucuuc

SEQ ID NO: 12079 - RNA, 19 nt, artificial
  Oligomer
uggaugaugaugggacugc

SEQ ID NO: 12080 - RNA, 19 nt, artificial
  Oligomer
uuucuuuuguagcuucuug

SEQ ID NO: 12081 - RNA, 19 nt, artificial
  Oligomer
cgaguacugaauaucuggc

SEQ ID NO: 12082 - RNA, 19 nt, artificial
  Oligomer
aagcaacgcaucgauuuug

SEQ ID NO: 12083 - RNA, 19 nt, artificial
  Oligomer
auuguagaacauagucucc

SEQ ID NO: 12084 - RNA, 19 nt, artificial
  Oligomer
gacaccucaaauuuaugcc

SEQ ID NO: 12085 - RNA, 19 nt, artificial
  Oligomer
cuccauagaugauugccgg

SEQ ID NO: 12086 - RNA, 19 nt, artificial
  Oligomer
uagauguggaaagugggca

SEQ ID NO: 12087 - RNA, 19 nt, artificial
  Oligomer
ucauucacaaagacguugg

SEQ ID NO: 12088 - RNA, 19 nt, artificial
  Oligomer
aacacgccaacacagaugg

SEQ ID NO: 12089 - RNA, 19 nt, artificial
  Oligomer
cugugguuuaggguggugu

SEQ ID NO: 12090 - RNA, 19 nt, artificial
  Oligomer
ucacagccuuccuaaauag

SEQ ID NO: 12091 - RNA, 19 nt, artificial
  Oligomer
cagccuuccuaaauagcuc

SEQ ID NO: 12092 - RNA, 19 nt, artificial
  Oligomer
cuuccuaaauagcuccuuc

SEQ ID NO: 12093 - RNA, 19 nt, artificial
  Oligomer
cuaaauagcuccuucucgc

SEQ ID NO: 12094 - RNA, 19 nt, artificial
  Oligomer
aagucaagcacagucaggg

SEQ ID NO: 12095 - RNA, 19 nt, artificial
  Oligomer
guguucucaaaccaguagc

SEQ ID NO: 12096 - RNA, 19 nt, artificial
  Oligomer
aacuggucgaggacaaugg

SEQ ID NO: 12097 - RNA, 19 nt, artificial
  Oligomer
caguaguuguugcagaccc

SEQ ID NO: 12098 - RNA, 19 nt, artificial
  Oligomer
uuucucauguagacaccag

SEQ ID NO: 12099 - RNA, 19 nt, artificial
  Oligomer
uucucauguagacaccagg

SEQ ID NO: 12100 - RNA, 19 nt, artificial
  Oligomer
aguacugaauaucuggcag

SEQ ID NO: 12101 - RNA, 19 nt, artificial
  Oligomer
uuuguggaagucaauuaga

SEQ ID NO: 12102 - RNA, 19 nt, artificial
  Oligomer
uggaagucaauuagagaug

SEQ ID NO: 12103 - RNA, 19 nt, artificial
  Oligomer
uggucuuuaucuucuuugg

SEQ ID NO: 12104 - RNA, 19 nt, artificial
  Oligomer
uuauaaucaucaugcacug

SEQ ID NO: 12105 - RNA, 19 nt, artificial
  Oligomer
uauaaucaucaugcacugc

SEQ ID NO: 12106 - RNA, 19 nt, artificial
  Oligomer
gccuucucuacauucuugg

SEQ ID NO: 12107 - RNA, 19 nt, artificial
  Oligomer
uauccagcacagccauugc

SEQ ID NO: 12108 - RNA, 19 nt, artificial
  Oligomer
cuuguacucaaagccuugg

SEQ ID NO: 12109 - RNA, 19 nt, artificial
  Oligomer
caccuccauagaugauugc

SEQ ID NO: 12110 - RNA, 19 nt, artificial
  Oligomer
ugacugagaagauguagac

SEQ ID NO: 12111 - RNA, 19 nt, artificial
  Oligomer
uagcgguugaggaaagucu

SEQ ID NO: 12112 - RNA, 19 nt, artificial
  Oligomer
aggaagguuaugagguugc

SEQ ID NO: 12113 - RNA, 19 nt, artificial
  Oligomer
cauacaugguaaacauuag

SEQ ID NO: 12114 - RNA, 19 nt, artificial
  Oligomer
agcagcuggaugaugaugg

SEQ ID NO: 12115 - RNA, 19 nt, artificial
  Oligomer
uuggguucagaugucuucu

SEQ ID NO: 12116 - RNA, 19 nt, artificial
  Oligomer
cuuugaguuucuuuuguag

SEQ ID NO: 12117 - RNA, 19 nt, artificial
  Oligomer
uuugaguuucuuuuguagc

SEQ ID NO: 12118 - RNA, 19 nt, artificial
  Oligomer
cgaauccaguaguuguugc

SEQ ID NO: 12119 - RNA, 19 nt, artificial
  Oligomer
gaauccaguaguuguugca

SEQ ID NO: 12120 - RNA, 19 nt, artificial
  Oligomer
cauuucucauguagacacc

SEQ ID NO: 12121 - RNA, 19 nt, artificial
  Oligomer
agcaacgcaucgauuuugu

SEQ ID NO: 12122 - RNA, 19 nt, artificial
  Oligomer
agucaauuagagauguggg

SEQ ID NO: 12123 - RNA, 19 nt, artificial
  Oligomer
auaaucaucaugcacugca

SEQ ID NO: 12124 - RNA, 19 nt, artificial
  Oligomer
cuaagguggauucugaugg

SEQ ID NO: 12125 - RNA, 19 nt, artificial
  Oligomer
uaguggugcaugaaguggg

SEQ ID NO: 12126 - RNA, 19 nt, artificial
  Oligomer
cugacuuguacucaaagcc

SEQ ID NO: 12127 - RNA, 19 nt, artificial
  Oligomer
cauagaugauugccgggac

SEQ ID NO: 12128 - RNA, 19 nt, artificial
  Oligomer
aagacauacaugauggcca

SEQ ID NO: 12129 - RNA, 19 nt, artificial
  Oligomer
aucauucacaaagacguug

SEQ ID NO: 12130 - RNA, 19 nt, artificial
  Oligomer
aaauggccaggacaacagc

SEQ ID NO: 12131 - RNA, 19 nt, artificial
  Oligomer
auaguaguaagcacgaucu

SEQ ID NO: 12132 - RNA, 19 nt, artificial
  Oligomer
uuuuugccaaaccucuucu

SEQ ID NO: 12133 - RNA, 19 nt, artificial
  Oligomer
aucucuaauaccauuucca

SEQ ID NO: 12134 - RNA, 19 nt, artificial
  Oligomer
aauaccauuuccaccucca

SEQ ID NO: 12135 - RNA, 19 nt, artificial
  Oligomer
cagcaugaagugaaaaucc

SEQ ID NO: 12136 - RNA, 19 nt, artificial
  Oligomer
ugaaaauccucccauguca

SEQ ID NO: 12137 - RNA, 19 nt, artificial
  Oligomer
uuggcugcuuccuucuuca

SEQ ID NO: 12138 - RNA, 19 nt, artificial
  Oligomer
cucuuugaguuucuuuugu

SEQ ID NO: 12139 - RNA, 19 nt, artificial
  Oligomer
gaagcagacucacuaaggg

SEQ ID NO: 12140 - RNA, 19 nt, artificial
  Oligomer
uccucuuaaaaucuuugcu

SEQ ID NO: 12141 - RNA, 19 nt, artificial
  Oligomer
ucgaggacaauggcacuga

SEQ ID NO: 12142 - RNA, 19 nt, artificial
  Oligomer
aauccaguaguuguugcag

SEQ ID NO: 12143 - RNA, 19 nt, artificial
  Oligomer
uaguuguugcagacccuga

SEQ ID NO: 12144 - RNA, 19 nt, artificial
  Oligomer
uuguugcagacccugagag

SEQ ID NO: 12145 - RNA, 19 nt, artificial
  Oligomer
auucuaugucuugaccugg

SEQ ID NO: 12146 - RNA, 19 nt, artificial
  Oligomer
gacaucaagaauaucaggg

SEQ ID NO: 12147 - RNA, 19 nt, artificial
  Oligomer
gaagucaauuagagaugug

SEQ ID NO: 12148 - RNA, 19 nt, artificial
  Oligomer
uuguaccuuuucaccucca

SEQ ID NO: 12149 - RNA, 19 nt, artificial
  Oligomer
gucuuuaucuucuuuggga

SEQ ID NO: 12150 - RNA, 19 nt, artificial
  Oligomer
uuguagaacauagucuccu

SEQ ID NO: 12151 - RNA, 19 nt, artificial
  Oligomer
uuguauaauugucuggguc

SEQ ID NO: 12152 - RNA, 19 nt, artificial
  Oligomer
uccauagaugauugccggg

SEQ ID NO: 12153 - RNA, 19 nt, artificial
  Oligomer
guagauguggaaagugggc

SEQ ID NO: 12154 - RNA, 19 nt, artificial
  Oligomer
uagcugccauggaugauga

SEQ ID NO: 12155 - RNA, 19 nt, artificial
  Oligomer
acauacaugauggccagga

SEQ ID NO: 12156 - RNA, 19 nt, artificial
  Oligomer
aaccaccaauagaacuucu

SEQ ID NO: 12157 - RNA, 19 nt, artificial
  Oligomer
cauucacaaagacguuggg

SEQ ID NO: 12158 - RNA, 19 nt, artificial
  Oligomer
auggugagcaagauauaag

SEQ ID NO: 12159 - RNA, 19 nt, artificial
  Oligomer
aagccauaguaguaagcac

SEQ ID NO: 12160 - RNA, 19 nt, artificial
  Oligomer
agcaugaagugaaaauccu

SEQ ID NO: 12161 - RNA, 19 nt, artificial
  Oligomer
ugaagugaaaauccuccca

SEQ ID NO: 12162 - RNA, 19 nt, artificial
  Oligomer
cucucaccuuucucucugg

SEQ ID NO: 12163 - RNA, 19 nt, artificial
  Oligomer
cucuucagaacuaaacagc

SEQ ID NO: 12164 - RNA, 19 nt, artificial
  Oligomer
uggacaggaugagguugac

SEQ ID NO: 12165 - RNA, 19 nt, artificial
  Oligomer
guagcuucuuguguucucg

SEQ ID NO: 12166 - RNA, 19 nt, artificial
  Oligomer
ugccagacaaagacauugg

SEQ ID NO: 12167 - RNA, 19 nt, artificial
  Oligomer
agggugguauuucggaugu

SEQ ID NO: 12168 - RNA, 19 nt, artificial
  Oligomer
cucuuaaaaucuuugcuuc

SEQ ID NO: 12169 - RNA, 19 nt, artificial
  Oligomer
uaaaaucuuugcuucugug

SEQ ID NO: 12170 - RNA, 19 nt, artificial
  Oligomer
acauuaggguugagaucac

SEQ ID NO: 12171 - RNA, 19 nt, artificial
  Oligomer
cuguacgggagaauuugcc

SEQ ID NO: 12172 - RNA, 19 nt, artificial
  Oligomer
uucucccgaauccaguagu

SEQ ID NO: 12173 - RNA, 19 nt, artificial
  Oligomer
auccaguaguuguugcaga

SEQ ID NO: 12174 - RNA, 19 nt, artificial
  Oligomer
aguaguuguugcagacccu

SEQ ID NO: 12175 - RNA, 19 nt, artificial
  Oligomer
aguuguugcagacccugag

SEQ ID NO: 12176 - RNA, 19 nt, artificial
  Oligomer
ucucauguagacaccaggg

SEQ ID NO: 12177 - RNA, 19 nt, artificial
  Oligomer
aaauauuuuacagcucagc

SEQ ID NO: 12178 - RNA, 19 nt, artificial
  Oligomer
uuaaagagcugaguaugga

SEQ ID NO: 12179 - RNA, 19 nt, artificial
  Oligomer
uaccaaagcaacgcaucga

SEQ ID NO: 12180 - RNA, 19 nt, artificial
  Oligomer
cacuauuguaccuuuucac

SEQ ID NO: 12181 - RNA, 19 nt, artificial
  Oligomer
acuauuguaccuuuucacc

SEQ ID NO: 12182 - RNA, 19 nt, artificial
  Oligomer
uaagguggauucugaugga

SEQ ID NO: 12183 - RNA, 19 nt, artificial
  Oligomer
auaguggugcaugaagugg

SEQ ID NO: 12184 - RNA, 19 nt, artificial
  Oligomer
ucuacauucuuggucauuc

SEQ ID NO: 12185 - RNA, 19 nt, artificial
  Oligomer
cuucuuacacagcauuugg

SEQ ID NO: 12186 - RNA, 19 nt, artificial
  Oligomer
guauccagcacagccauug

SEQ ID NO: 12187 - RNA, 19 nt, artificial
  Oligomer
ucaccuccauagaugauug

SEQ ID NO: 12188 - RNA, 19 nt, artificial
  Oligomer
accuccauagaugauugcc

SEQ ID NO: 12189 - RNA, 19 nt, artificial
  Oligomer
ccuccauagaugauugccg

SEQ ID NO: 12190 - RNA, 19 nt, artificial
  Oligomer
aguagauguggaaaguggg

SEQ ID NO: 12191 - RNA, 19 nt, artificial
  Oligomer
ucucgcaggaagguuauga

SEQ ID NO: 12192 - RNA, 19 nt, artificial
  Oligomer
aaaauccucccaugucagc

SEQ ID NO: 12193 - RNA, 19 nt, artificial
  Oligomer
gugaagaauucguccuugg

SEQ ID NO: 12194 - RNA, 19 nt, artificial
  Oligomer
caugguaaacauuagacgg

SEQ ID NO: 12195 - RNA, 19 nt, artificial
  Oligomer
uuccucuucagaacuaaac

SEQ ID NO: 12196 - RNA, 19 nt, artificial
  Oligomer
uucagaacuaaacagcagc

SEQ ID NO: 12197 - RNA, 19 nt, artificial
  Oligomer
uuagggaucuugagcagca

SEQ ID NO: 12198 - RNA, 19 nt, artificial
  Oligomer
augucuucuuuccucuuaa

SEQ ID NO: 12199 - RNA, 19 nt, artificial
  Oligomer
gacaaagacauugggcugc

SEQ ID NO: 12200 - RNA, 19 nt, artificial
  Oligomer
cuuaaaaucuuugcuucug

SEQ ID NO: 12201 - RNA, 19 nt, artificial
  Oligomer
aaagagcugaguauggagg

SEQ ID NO: 12202 - RNA, 19 nt, artificial
  Oligomer
aagagcugaguauggaggg

SEQ ID NO: 12203 - RNA, 19 nt, artificial
  Oligomer
aucgaguacugaauaucug

SEQ ID NO: 12204 - RNA, 19 nt, artificial
  Oligomer
aucaagaauaucagggcug

SEQ ID NO: 12205 - RNA, 19 nt, artificial
  Oligomer
ucaagaauaucagggcugg

SEQ ID NO: 12206 - RNA, 19 nt, artificial
  Oligomer
uuuguuuccuggugcccuc

SEQ ID NO: 12207 - RNA, 19 nt, artificial
  Oligomer
auaccaaagcaacgcaucg

SEQ ID NO: 12208 - RNA, 19 nt, artificial
  Oligomer
uaccuuuucaccuccacac

SEQ ID NO: 12209 - RNA, 19 nt, artificial
  Oligomer
guggucuuuaucuucuuug

SEQ ID NO: 12210 - RNA, 19 nt, artificial
  Oligomer
ggacuuauaaucaucaugc

SEQ ID NO: 12211 - RNA, 19 nt, artificial
  Oligomer
aaguucucauaguggugca

SEQ ID NO: 12212 - RNA, 19 nt, artificial
  Oligomer
acaccucaaauuuaugcca

SEQ ID NO: 12213 - RNA, 19 nt, artificial
  Oligomer
auguucugguagguggcga

SEQ ID NO: 12214 - RNA, 19 nt, artificial
  Oligomer
cucaaauuuaugccacucc

SEQ ID NO: 12215 - RNA, 19 nt, artificial
  Oligomer
agauguggaaagugggcag

SEQ ID NO: 12216 - RNA, 19 nt, artificial
  Oligomer
augaugagcagggcauaga

SEQ ID NO: 12217 - RNA, 19 nt, artificial
  Oligomer
uagagcaggauguagaggu

SEQ ID NO: 12218 - RNA, 19 nt, artificial
  Oligomer
gcgaagacauacaugaugg

SEQ ID NO: 12219 - RNA, 19 nt, artificial
  Oligomer
gaagacauacaugauggcc

SEQ ID NO: 12220 - RNA, 19 nt, artificial
  Oligomer
agacauacaugauggccag

SEQ ID NO: 12221 - RNA, 19 nt, artificial
  Oligomer
cauacaugauggccaggac

SEQ ID NO: 12222 - RNA, 19 nt, artificial
  Oligomer
auacaugauggccaggacc

SEQ ID NO: 12223 - RNA, 19 nt, artificial
  Oligomer
gaaccaccaauagaacuuc

SEQ ID NO: 12224 - RNA, 19 nt, artificial
  Oligomer
aaagucucucgcaggaagg

SEQ ID NO: 12225 - RNA, 19 nt, artificial
  Oligomer
cucgcaggaagguuaugag

SEQ ID NO: 12226 - RNA, 19 nt, artificial
  Oligomer
ggaagguuaugagguugcg

SEQ ID NO: 12227 - RNA, 19 nt, artificial
  Oligomer
gaagguuaugagguugcgg

SEQ ID NO: 12228 - RNA, 19 nt, artificial
  Oligomer
auaagagaacaugaaggag

SEQ ID NO: 12229 - RNA, 19 nt, artificial
  Oligomer
caaagccauaguaguaagc

SEQ ID NO: 12230 - RNA, 19 nt, artificial
  Oligomer
aaagccauaguaguaagca

SEQ ID NO: 12231 - RNA, 19 nt, artificial
  Oligomer
agccauaguaguaagcacg

SEQ ID NO: 12232 - RNA, 19 nt, artificial
  Oligomer
cuuuuugccaaaccucuuc

SEQ ID NO: 12233 - RNA, 19 nt, artificial
  Oligomer
ucuaauaccauuuccaccu

SEQ ID NO: 12234 - RNA, 19 nt, artificial
  Oligomer
cuaauaccauuuccaccuc

SEQ ID NO: 12235 - RNA, 19 nt, artificial
  Oligomer
auucucauccaggucauac

SEQ ID NO: 12236 - RNA, 19 nt, artificial
  Oligomer
ugguaaacauuagacggga

SEQ ID NO: 12237 - RNA, 19 nt, artificial
  Oligomer
uugccauccuugucagcca

SEQ ID NO: 12238 - RNA, 19 nt, artificial
  Oligomer
uuuuguagcuucuuguguu

SEQ ID NO: 12239 - RNA, 19 nt, artificial
  Oligomer
uuguagcuucuuguguucu

SEQ ID NO: 12240 - RNA, 19 nt, artificial
  Oligomer
agcuucuuguguucucggc

SEQ ID NO: 12241 - RNA, 19 nt, artificial
  Oligomer
uauuucggaugucuucaau

SEQ ID NO: 12242 - RNA, 19 nt, artificial
  Oligomer
gacaauggcacugaacagg

SEQ ID NO: 12243 - RNA, 19 nt, artificial
  Oligomer
uucaaccacuauguugucc

SEQ ID NO: 12244 - RNA, 19 nt, artificial
  Oligomer
ucugugcucuacuucuugc

SEQ ID NO: 12245 - RNA, 19 nt, artificial
  Oligomer
cugugcucuacuucuugcc

SEQ ID NO: 12246 - RNA, 19 nt, artificial
  Oligomer
uggguacuguucagauugg

SEQ ID NO: 12247 - RNA, 19 nt, artificial
  Oligomer
cuugggagcuuugaaaacc

SEQ ID NO: 12248 - RNA, 19 nt, artificial
  Oligomer
gagcuuugaaaacccuugu

SEQ ID NO: 12249 - RNA, 19 nt, artificial
  Oligomer
aaugacagcuggcauuucu

SEQ ID NO: 12250 - RNA, 19 nt, artificial
  Oligomer
auuucucauguagacacca

SEQ ID NO: 12251 - RNA, 19 nt, artificial
  Oligomer
aaacauucuaugucuugac

SEQ ID NO: 12252 - RNA, 19 nt, artificial
  Oligomer
aacauucuaugucuugacc

SEQ ID NO: 12253 - RNA, 19 nt, artificial
  Oligomer
guuaaagagcugaguaugg

SEQ ID NO: 12254 - RNA, 19 nt, artificial
  Oligomer
cuucuugccuucacccuca

SEQ ID NO: 12255 - RNA, 19 nt, artificial
  Oligomer
ucuuuguuuccuggugccc

SEQ ID NO: 12256 - RNA, 19 nt, artificial
  Oligomer
uucuugccuucacccucac

SEQ ID NO: 12257 - RNA, 19 nt, artificial
  Oligomer
cucccucaaaugucagucc

SEQ ID NO: 12258 - RNA, 19 nt, artificial
  Oligomer
cuuuucaccuccacacuug

SEQ ID NO: 12259 - RNA, 19 nt, artificial
  Oligomer
uuucaccuccacacuuguc

SEQ ID NO: 12260 - RNA, 19 nt, artificial
  Oligomer
auagucuccugccuuuucu

SEQ ID NO: 12261 - RNA, 19 nt, artificial
  Oligomer
aagguggauucugauggag

SEQ ID NO: 12262 - RNA, 19 nt, artificial
  Oligomer
agcugggugacauaaaugu

SEQ ID NO: 12263 - RNA, 19 nt, artificial
  Oligomer
aaggaugacuugaagacca

SEQ ID NO: 12264 - RNA, 19 nt, artificial
  Oligomer
uucacccucacucuuccag

SEQ ID NO: 12265 - RNA, 19 nt, artificial
  Oligomer
uugucaccuccauagauga

SEQ ID NO: 12266 - RNA, 19 nt, artificial
  Oligomer
auguagaggugguggguca

SEQ ID NO: 12267 - RNA, 19 nt, artificial
  Oligomer
cacgucggaaagaacaugg

SEQ ID NO: 12268 - RNA, 19 nt, artificial
  Oligomer
aaaaggcacauagcgguug

SEQ ID NO: 12269 - RNA, 19 nt, artificial
  Oligomer
auagcgguugaggaaaguc

SEQ ID NO: 12270 - RNA, 19 nt, artificial
  Oligomer
caggaagguuaugagguug

SEQ ID NO: 12271 - RNA, 19 nt, artificial
  Oligomer
uaagagaacaugaaggaga

SEQ ID NO: 12272 - RNA, 19 nt, artificial
  Oligomer
aagagaacaugaaggagac

SEQ ID NO: 12273 - RNA, 19 nt, artificial
  Oligomer
aacaugaaggagacgcugg

SEQ ID NO: 12274 - RNA, 19 nt, artificial
  Oligomer
aagugaaaauccucccaug

SEQ ID NO: 12275 - RNA, 19 nt, artificial
  Oligomer
aaauccucccaugucagcu

SEQ ID NO: 12276 - RNA, 19 nt, artificial
  Oligomer
uuaaaccagccgucauagc

SEQ ID NO: 12277 - RNA, 19 nt, artificial
  Oligomer
agcuggaugaugaugggac

SEQ ID NO: 12278 - RNA, 19 nt, artificial
  Oligomer
ucucuuugaguuucuuuug

SEQ ID NO: 12279 - RNA, 19 nt, artificial
  Oligomer
cuuuuguagcuucuugugu

SEQ ID NO: 12280 - RNA, 19 nt, artificial
  Oligomer
uguagcuucuuguguucuc

SEQ ID NO: 12281 - RNA, 19 nt, artificial
  Oligomer
uagcuucuuguguucucgg

SEQ ID NO: 12282 - RNA, 19 nt, artificial
  Oligomer
aaagaagucaagcacaguc

SEQ ID NO: 12283 - RNA, 19 nt, artificial
  Oligomer
augccagacaaagacauug

SEQ ID NO: 12284 - RNA, 19 nt, artificial
  Oligomer
acaauggcacugaacaggg

SEQ ID NO: 12285 - RNA, 19 nt, artificial
  Oligomer
uuacagcucagcuuuuuag

SEQ ID NO: 12286 - RNA, 19 nt, artificial
  Oligomer
gaccacuccaguagaugca

SEQ ID NO: 12287 - RNA, 19 nt, artificial
  Oligomer
uccaguagaugcagagagg

SEQ ID NO: 12288 - RNA, 19 nt, artificial
  Oligomer
caaauaccaaagcaacgca

SEQ ID NO: 12289 - RNA, 19 nt, artificial
  Oligomer
uguaccuuuucaccuccac

SEQ ID NO: 12290 - RNA, 19 nt, artificial
  Oligomer
uuuucaccuccacacuugu

SEQ ID NO: 12291 - RNA, 19 nt, artificial
  Oligomer
gacuuauaaucaucaugca

SEQ ID NO: 12292 - RNA, 19 nt, artificial
  Oligomer
cuuauaaucaucaugcacu

SEQ ID NO: 12293 - RNA, 19 nt, artificial
  Oligomer
uccugccuuuucucauuug

SEQ ID NO: 12294 - RNA, 19 nt, artificial
  Oligomer
gugcacagaagagaaggca

SEQ ID NO: 12295 - RNA, 19 nt, artificial
  Oligomer
ucagaaguucucauagugg

SEQ ID NO: 12296 - RNA, 19 nt, artificial
  Oligomer
caggccuucucuacauucu

SEQ ID NO: 12297 - RNA, 19 nt, artificial
  Oligomer
cacucauacacagcgaugu

SEQ ID NO: 12298 - RNA, 19 nt, artificial
  Oligomer
caccucaaauuuaugccac

SEQ ID NO: 12299 - RNA, 19 nt, artificial
  Oligomer
aauugcagguaggucacuc

SEQ ID NO: 12300 - RNA, 19 nt, artificial
  Oligomer
auagagcaggauguagagg

SEQ ID NO: 12301 - RNA, 19 nt, artificial
  Oligomer
cgaagacauacaugauggc

SEQ ID NO: 12302 - RNA, 19 nt, artificial
  Oligomer
aagcacaccugucauaccu

SEQ ID NO: 12303 - RNA, 19 nt, artificial
  Oligomer
accaccaauagaacuucug

SEQ ID NO: 12304 - RNA, 19 nt, artificial
  Oligomer
uggugagcaagauauaaga

SEQ ID NO: 12305 - RNA, 19 nt, artificial
  Oligomer
uaguaguaagcacgaucug

SEQ ID NO: 12306 - RNA, 19 nt, artificial
  Oligomer
agauggccgagaagauugc

SEQ ID NO: 12307 - RNA, 19 nt, artificial
  Oligomer
aucuucucuugcagcgccu

SEQ ID NO: 12308 - RNA, 19 nt, artificial
  Oligomer
acucucaccuuucucucug

SEQ ID NO: 12309 - RNA, 19 nt, artificial
  Oligomer
uugucagccagagagaaca

SEQ ID NO: 12310 - RNA, 19 nt, artificial
  Oligomer
auggacuccacaaacaugu

SEQ ID NO: 12311 - RNA, 19 nt, artificial
  Oligomer
cuucagaacuaaacagcag

SEQ ID NO: 12312 - RNA, 19 nt, artificial
  Oligomer
ugcucuacuucuugccuuc

SEQ ID NO: 12313 - RNA, 19 nt, artificial
  Oligomer
uacuucuugccuucacccu

SEQ ID NO: 12314 - RNA, 19 nt, artificial
  Oligomer
aucagugguugcuucuagg

SEQ ID NO: 12315 - RNA, 19 nt, artificial
  Oligomer
auauuuuacagcucagcuu

SEQ ID NO: 12316 - RNA, 19 nt, artificial
  Oligomer
gugacaucaagaauaucag

SEQ ID NO: 12317 - RNA, 19 nt, artificial
  Oligomer
caucaagaauaucagggcu

SEQ ID NO: 12318 - RNA, 19 nt, artificial
  Oligomer
cagguucuaagcaucacag

SEQ ID NO: 12319 - RNA, 19 nt, artificial
  Oligomer
aaauaccaaagcaacgcau

SEQ ID NO: 12320 - RNA, 19 nt, artificial
  Oligomer
uguagaacauagucuccug

SEQ ID NO: 12321 - RNA, 19 nt, artificial
  Oligomer
agccacucauacacagcga

SEQ ID NO: 12322 - RNA, 19 nt, artificial
  Oligomer
gaggcgaagacauacauga

SEQ ID NO: 12323 - RNA, 19 nt, artificial
  Oligomer
aagauguagacauugacug

SEQ ID NO: 12324 - RNA, 19 nt, artificial
  Oligomer
agagccugauacacaccgu

SEQ ID NO: 12325 - RNA, 19 nt, artificial
  Oligomer
uucuccacgaagcgcuugu

SEQ ID NO: 12326 - RNA, 19 nt, artificial
  Oligomer
cucgcugcaucuucucuug

SEQ ID NO: 12327 - RNA, 19 nt, artificial
  Oligomer
caaaccucuucuucagucc

SEQ ID NO: 12328 - RNA, 19 nt, artificial
  Oligomer
cuaaacagcagcaccaggu

SEQ ID NO: 12329 - RNA, 19 nt, artificial
  Oligomer
aaacagcagcaccagguca

SEQ ID NO: 12330 - RNA, 19 nt, artificial
  Oligomer
cagagagcaaugaugguga

SEQ ID NO: 12331 - RNA, 19 nt, artificial
  Oligomer
gagcaaugauggugauggc

SEQ ID NO: 12332 - RNA, 19 nt, artificial
  Oligomer
cuuuaugccagacaaagac

SEQ ID NO: 12333 - RNA, 19 nt, artificial
  Oligomer
cagacaaagacauugggcu

SEQ ID NO: 12334 - RNA, 19 nt, artificial
  Oligomer
ucuguacgggagaauuugc

SEQ ID NO: 12335 - RNA, 19 nt, artificial
  Oligomer
uucugugcucuacuucuug

SEQ ID NO: 12336 - RNA, 19 nt, artificial
  Oligomer
cauucuaugucuugaccug

SEQ ID NO: 12337 - RNA, 19 nt, artificial
  Oligomer
aauauuuuacagcucagcu

SEQ ID NO: 12338 - RNA, 19 nt, artificial
  Oligomer
uacagcucagcuuuuuagg

SEQ ID NO: 12339 - RNA, 19 nt, artificial
  Oligomer
uaaagagcugaguauggag

SEQ ID NO: 12340 - RNA, 19 nt, artificial
  Oligomer
ucaaaugucaguccaagca

SEQ ID NO: 12341 - RNA, 19 nt, artificial
  Oligomer
uccaagcaaauaccaaagc

SEQ ID NO: 12342 - RNA, 19 nt, artificial
  Oligomer
aagcacuauuguaccuuuu

SEQ ID NO: 12343 - RNA, 19 nt, artificial
  Oligomer
cagaaguucucauaguggu

SEQ ID NO: 12344 - RNA, 19 nt, artificial
  Oligomer
ugcagggaguugaagaagg

SEQ ID NO: 12345 - RNA, 19 nt, artificial
  Oligomer
aggaugacuugaagaccag

SEQ ID NO: 12346 - RNA, 19 nt, artificial
  Oligomer
uggaauugcagguagguca

SEQ ID NO: 12347 - RNA, 19 nt, artificial
  Oligomer
gugagcaagauauaagaga

SEQ ID NO: 12348 - RNA, 19 nt, artificial
  Oligomer
aagauugccacacacacga

SEQ ID NO: 12349 - RNA, 19 nt, artificial
  Oligomer
uuuugccaaaccucuucuu

SEQ ID NO: 12350 - RNA, 19 nt, artificial
  Oligomer
uuugccaaaccucuucuuc

SEQ ID NO: 12351 - RNA, 19 nt, artificial
  Oligomer
accuccaccuuugacacag

SEQ ID NO: 12352 - RNA, 19 nt, artificial
  Oligomer
cuuucaugaagaccaccag

SEQ ID NO: 12353 - RNA, 19 nt, artificial
  Oligomer
aacuaaacagcagcaccag

SEQ ID NO: 12354 - RNA, 19 nt, artificial
  Oligomer
augauggugauggcaaaac

SEQ ID NO: 12355 - RNA, 19 nt, artificial
  Oligomer
acaaagacauugggcugca

SEQ ID NO: 12356 - RNA, 19 nt, artificial
  Oligomer
uccuccaacuccgaaaucu

SEQ ID NO: 12357 - RNA, 19 nt, artificial
  Oligomer
ggguacuguucagauuggg

SEQ ID NO: 12358 - RNA, 19 nt, artificial
  Oligomer
caucagugguugcuucuag

SEQ ID NO: 12359 - RNA, 19 nt, artificial
  Oligomer
gaaacauucuaugucuuga

SEQ ID NO: 12360 - RNA, 19 nt, artificial
  Oligomer
uccagguucuaagcaucac

SEQ ID NO: 12361 - RNA, 19 nt, artificial
  Oligomer
cucagaaguucucauagug

SEQ ID NO: 12362 - RNA, 19 nt, artificial
  Oligomer
cagcuugucaccuccauag

SEQ ID NO: 12363 - RNA, 19 nt, artificial
  Oligomer
agagcaggauguagaggug

SEQ ID NO: 12364 - RNA, 19 nt, artificial
  Oligomer
acgucggaaagaacauggu

SEQ ID NO: 12365 - RNA, 19 nt, artificial
  Oligomer
ugcacucucaccuuucucu

SEQ ID NO: 12366 - RNA, 19 nt, artificial
  Oligomer
auugccacacacacgaugu

SEQ ID NO: 12367 - RNA, 19 nt, artificial
  Oligomer
acucccggaacauagacuc

SEQ ID NO: 12368 - RNA, 19 nt, artificial
  Oligomer
agccuuucaugaagaccac

SEQ ID NO: 12369 - RNA, 19 nt, artificial
  Oligomer
aacauggacuccacaaaca

SEQ ID NO: 12370 - RNA, 19 nt, artificial
  Oligomer
cugagcaaaaaggugucug

SEQ ID NO: 12371 - RNA, 19 nt, artificial
  Oligomer
ugagcaaaaaggugucuga

SEQ ID NO: 12372 - RNA, 19 nt, artificial
  Oligomer
agacucacuaagggaaggc

SEQ ID NO: 12373 - RNA, 19 nt, artificial
  Oligomer
ucaaagaagucaagcacag

SEQ ID NO: 12374 - RNA, 19 nt, artificial
  Oligomer
cacauagucuguacgggag

SEQ ID NO: 12375 - RNA, 19 nt, artificial
  Oligomer
cuccaacuccgaaaucugg

SEQ ID NO: 12376 - RNA, 19 nt, artificial
  Oligomer
augacagcuggcauuucuc

SEQ ID NO: 12377 - RNA, 19 nt, artificial
  Oligomer
uuuuacagcucagcuuuuu

SEQ ID NO: 12378 - RNA, 19 nt, artificial
  Oligomer
uaucacuggugacaucaag

SEQ ID NO: 12379 - RNA, 19 nt, artificial
  Oligomer
ugacaucaagaauaucagg

SEQ ID NO: 12380 - RNA, 19 nt, artificial
  Oligomer
ucccucaaaugucagucca

SEQ ID NO: 12381 - RNA, 19 nt, artificial
  Oligomer
ugucaguccaagcaaauac

SEQ ID NO: 12382 - RNA, 19 nt, artificial
  Oligomer
uugauaaacagguggacuu

SEQ ID NO: 12383 - RNA, 19 nt, artificial
  Oligomer
uugccuucacccucacucu

SEQ ID NO: 12384 - RNA, 19 nt, artificial
  Oligomer
acagguggacuuauaauca

SEQ ID NO: 12385 - RNA, 19 nt, artificial
  Oligomer
uaggugcacagaagagaag

SEQ ID NO: 12386 - RNA, 19 nt, artificial
  Oligomer
agggaguugaagaagggcu

SEQ ID NO: 12387 - RNA, 19 nt, artificial
  Oligomer
cuccgguucagcacuuucu

SEQ ID NO: 12388 - RNA, 19 nt, artificial
  Oligomer
uugaggauggaggcaaagg

SEQ ID NO: 12389 - RNA, 19 nt, artificial
  Oligomer
uccaaacgguccaucaagg

SEQ ID NO: 12390 - RNA, 19 nt, artificial
  Oligomer
gucggaaagaacaugguag

SEQ ID NO: 12391 - RNA, 19 nt, artificial
  Oligomer
ucggaaagaacaugguagc

SEQ ID NO: 12392 - RNA, 19 nt, artificial
  Oligomer
uuggacccaucauucacaa

SEQ ID NO: 12393 - RNA, 19 nt, artificial
  Oligomer
uccagagccugauacacac

SEQ ID NO: 12394 - RNA, 19 nt, artificial
  Oligomer
augaacgagacucgacagc

SEQ ID NO: 12395 - RNA, 19 nt, artificial
  Oligomer
gagccuuucaugaagacca

SEQ ID NO: 12396 - RNA, 19 nt, artificial
  Oligomer
cuccacaaacauguccugg

SEQ ID NO: 12397 - RNA, 19 nt, artificial
  Oligomer
gaacuaaacagcagcacca

SEQ ID NO: 12398 - RNA, 19 nt, artificial
  Oligomer
aggcagcagagagcaauga

SEQ ID NO: 12399 - RNA, 19 nt, artificial
  Oligomer
uuuaugccagacaaagaca

SEQ ID NO: 12400 - RNA, 19 nt, artificial
  Oligomer
uuaugccagacaaagacau

SEQ ID NO: 12401 - RNA, 19 nt, artificial
  Oligomer
aaagacauugggcugcagg

SEQ ID NO: 12402 - RNA, 19 nt, artificial
  Oligomer
agcagcucauucaccuccu

SEQ ID NO: 12403 - RNA, 19 nt, artificial
  Oligomer
cuuccggaaaugacagcug

SEQ ID NO: 12404 - RNA, 19 nt, artificial
  Oligomer
uuuuuaggaaagagcccga

SEQ ID NO: 12405 - RNA, 19 nt, artificial
  Oligomer
gucaguccaagcaaauacc

SEQ ID NO: 12406 - RNA, 19 nt, artificial
  Oligomer
aacauagucuccugccuuu

SEQ ID NO: 12407 - RNA, 19 nt, artificial
  Oligomer
gucugggucaauauucucc

SEQ ID NO: 12408 - RNA, 19 nt, artificial
  Oligomer
uugccaaaccucuucuuca

SEQ ID NO: 12409 - RNA, 19 nt, artificial
  Oligomer
ugccaaaccucuucuucag

SEQ ID NO: 12410 - RNA, 19 nt, artificial
  Oligomer
auccagucagaagagcucc

SEQ ID NO: 12411 - RNA, 19 nt, artificial
  Oligomer
acuccacaaacauguccug

SEQ ID NO: 12412 - RNA, 19 nt, artificial
  Oligomer
agaggccaccacaaauucc

SEQ ID NO: 12413 - RNA, 19 nt, artificial
  Oligomer
agaacauagucuccugccu

SEQ ID NO: 12414 - RNA, 19 nt, artificial
  Oligomer
gacaggcucagaaguucuc

SEQ ID NO: 12415 - RNA, 19 nt, artificial
  Oligomer
uucaccacgcugaucucca

SEQ ID NO: 12416 - RNA, 19 nt, artificial
  Oligomer
aggguggucugugcaaugu

SEQ ID NO: 12417 - RNA, 19 nt, artificial
  Oligomer
auuuccaccuccaccucca

SEQ ID NO: 12418 - RNA, 19 nt, artificial
  Oligomer
auguuguccuccaacuccg

SEQ ID NO: 12419 - RNA, 19 nt, artificial
  Oligomer
aacgcaucgauuuugugga

SEQ ID NO: 12420 - RNA, 19 nt, artificial
  Oligomer
ucugggucaauauucuccc

SEQ ID NO: 12421 - RNA, 19 nt, artificial
  Oligomer
cauucuuggucauuccugg

SEQ ID NO: 12422 - RNA, 19 nt, artificial
  Oligomer
guguccgagugaugaacga

SEQ ID NO: 12423 - RNA, 19 nt, artificial
  Oligomer
uaccauuuccaccuccacc

SEQ ID NO: 12424 - RNA, 19 nt, artificial
  Oligomer
aaggacagguagccauugc

SEQ ID NO: 12425 - RNA, 19 nt, artificial
  Oligomer
uucagaugucuucuuuccu

SEQ ID NO: 12426 - RNA, 19 nt, artificial
  Oligomer
aaauaggccaccacuccag

SEQ ID NO: 12427 - RNA, 19 nt, artificial
  Oligomer
cagaugucuucuuuccucu

SEQ ID NO: 12428 - RNA, 19 nt, artificial
  Oligomer
uugagaucacuccaguucc

SEQ ID NO: 12429 - RNA, 19 nt, artificial
  Oligomer
uauguuguccuccaacucc

SEQ ID NO: 12430 - RNA, 19 nt, artificial
  Oligomer
aucacagcuucugcacugg

SEQ ID NO: 12431 - RNA, 19 nt, artificial
  Oligomer
uuugggagauccugacugg

SEQ ID NO: 12432 - RNA, 19 nt, artificial
  Oligomer
cugggugacauaaaugugc

SEQ ID NO: 12433 - RNA, 19 nt, artificial
  Oligomer
uacacagcauuuggcugcc

SEQ ID NO: 12434 - RNA, 19 nt, artificial
  Oligomer
acuguccugacuuguacuc

SEQ ID NO: 12435 - RNA, 19 nt, artificial
  Oligomer
uuguacucaaagccuuggg

SEQ ID NO: 12436 - RNA, 19 nt, artificial
  Oligomer
gauguagacauugacugcg

SEQ ID NO: 12437 - RNA, 19 nt, artificial
  Oligomer
auguagacauugacugcgu

SEQ ID NO: 12438 - RNA, 19 nt, artificial
  Oligomer
accauuuccaccuccaccu

SEQ ID NO: 12439 - RNA, 19 nt, artificial
  Oligomer
gacucacuaagggaaggca

SEQ ID NO: 12440 - RNA, 19 nt, artificial
  Oligomer
uuaguaggaccaaaacugg

SEQ ID NO: 12441 - RNA, 19 nt, artificial
  Oligomer
uuuuaggaaagagcccgau

SEQ ID NO: 12442 - RNA, 19 nt, artificial
  Oligomer
uacugaauaucuggcagag

SEQ ID NO: 12443 - RNA, 19 nt, artificial
  Oligomer
aaguagggcugcuccuuuu

SEQ ID NO: 12444 - RNA, 19 nt, artificial
  Oligomer
acgguauccuguauacucc

SEQ ID NO: 12445 - RNA, 19 nt, artificial
  Oligomer
agauguagacauugacugc

SEQ ID NO: 12446 - RNA, 19 nt, artificial
  Oligomer
accuuugacacagagcugc

SEQ ID NO: 12447 - RNA, 19 nt, artificial
  Oligomer
aaaaaggugucugaagaag

SEQ ID NO: 12448 - RNA, 19 nt, artificial
  Oligomer
uagggaucuugagcagcag

SEQ ID NO: 12449 - RNA, 19 nt, artificial
  Oligomer
aauguugauaacagcgacc

SEQ ID NO: 12450 - RNA, 19 nt, artificial
  Oligomer
uuguucaggaccuuccgga

SEQ ID NO: 12451 - RNA, 19 nt, artificial
  Oligomer
cccagacaauuauacaaau

SEQ ID NO: 12452 - RNA, 19 nt, artificial
  Oligomer
acccagacaauuauacaaa

SEQ ID NO: 12453 - RNA, 19 nt, artificial
  Oligomer
cuaauugacuuccacaaaa

SEQ ID NO: 12454 - RNA, 19 nt, artificial
  Oligomer
agaauauugacccagacaa

SEQ ID NO: 12455 - RNA, 19 nt, artificial
  Oligomer
caguacucgaucucaauuc

SEQ ID NO: 12456 - RNA, 19 nt, artificial
  Oligomer
ucaguacucgaucucaauu

SEQ ID NO: 12457 - RNA, 19 nt, artificial
  Oligomer
gaauauugacccagacaau

SEQ ID NO: 12458 - RNA, 19 nt, artificial
  Oligomer
ccacuuuccacaucuacuu

SEQ ID NO: 12459 - RNA, 19 nt, artificial
  Oligomer
gggaggauuuucacuucau

SEQ ID NO: 12460 - RNA, 19 nt, artificial
  Oligomer
ggagcuauuuaggaaggcu

SEQ ID NO: 12461 - RNA, 19 nt, artificial
  Oligomer
ugguccuacuaaauauacu

SEQ ID NO: 12462 - RNA, 19 nt, artificial
  Oligomer
cucuaauugacuuccacaa

SEQ ID NO: 12463 - RNA, 19 nt, artificial
  Oligomer
gccacgcagucaaugucua

SEQ ID NO: 12464 - RNA, 19 nt, artificial
  Oligomer
ccaacaccacccuaaacca

SEQ ID NO: 12465 - RNA, 19 nt, artificial
  Oligomer
ggaggacaacauagugguu

SEQ ID NO: 12466 - RNA, 19 nt, artificial
  Oligomer
ccuuuuucaucgggcucuu

SEQ ID NO: 12467 - RNA, 19 nt, artificial
  Oligomer
ggaggugaaaagguacaau

SEQ ID NO: 12468 - RNA, 19 nt, artificial
  Oligomer
gucuaauguuuaccaugua

SEQ ID NO: 12469 - RNA, 19 nt, artificial
  Oligomer
cccgucuaauguuuaccau

SEQ ID NO: 12470 - RNA, 19 nt, artificial
  Oligomer
accucauccuguccaacaa

SEQ ID NO: 12471 - RNA, 19 nt, artificial
  Oligomer
ucaaccucauccuguccaa

SEQ ID NO: 12472 - RNA, 19 nt, artificial
  Oligomer
agacaucugaacccaacac

SEQ ID NO: 12473 - RNA, 19 nt, artificial
  Oligomer
caguuuugguccuacuaaa

SEQ ID NO: 12474 - RNA, 19 nt, artificial
  Oligomer
ccagauauucaguacucga

SEQ ID NO: 12475 - RNA, 19 nt, artificial
  Oligomer
cccaaagugucagcaacuu

SEQ ID NO: 12476 - RNA, 19 nt, artificial
  Oligomer
ugaccaagaauguagagaa

SEQ ID NO: 12477 - RNA, 19 nt, artificial
  Oligomer
cuguuguccuggccauuuu

SEQ ID NO: 12478 - RNA, 19 nt, artificial
  Oligomer
gccgcaaccucauaaccuu

SEQ ID NO: 12479 - RNA, 19 nt, artificial
  Oligomer
ccuucauguucucuuauau

SEQ ID NO: 12480 - RNA, 19 nt, artificial
  Oligomer
ggaggauuuucacuucaug

SEQ ID NO: 12481 - RNA, 19 nt, artificial
  Oligomer
acgaauucuucaccaugau

SEQ ID NO: 12482 - RNA, 19 nt, artificial
  Oligomer
ugccagauauucaguacuc

SEQ ID NO: 12483 - RNA, 19 nt, artificial
  Oligomer
ggcaccaggaaacaaagau

SEQ ID NO: 12484 - RNA, 19 nt, artificial
  Oligomer
gaggugaaaagguacaaua

SEQ ID NO: 12485 - RNA, 19 nt, artificial
  Oligomer
ggucccggcaaucaucuau

SEQ ID NO: 12486 - RNA, 19 nt, artificial
  Oligomer
uccuucauguucucuuaua

SEQ ID NO: 12487 - RNA, 19 nt, artificial
  Oligomer
gaagacaucugaacccaac

SEQ ID NO: 12488 - RNA, 19 nt, artificial
  Oligomer
gcagucccaucaucaucca

SEQ ID NO: 12489 - RNA, 19 nt, artificial
  Oligomer
caagaagcuacaaaagaaa

SEQ ID NO: 12490 - RNA, 19 nt, artificial
  Oligomer
gccagauauucaguacucg

SEQ ID NO: 12491 - RNA, 19 nt, artificial
  Oligomer
caaaaucgaugcguugcuu

SEQ ID NO: 12492 - RNA, 19 nt, artificial
  Oligomer
ggagacuauguucuacaau

SEQ ID NO: 12493 - RNA, 19 nt, artificial
  Oligomer
ggcauaaauuugagguguc

SEQ ID NO: 12494 - RNA, 19 nt, artificial
  Oligomer
ccggcaaucaucuauggag

SEQ ID NO: 12495 - RNA, 19 nt, artificial
  Oligomer
ugcccacuuuccacaucua

SEQ ID NO: 12496 - RNA, 19 nt, artificial
  Oligomer
ccaacgucuuugugaauga

SEQ ID NO: 12497 - RNA, 19 nt, artificial
  Oligomer
ccaucuguguuggcguguu

SEQ ID NO: 12498 - RNA, 19 nt, artificial
  Oligomer
acaccacccuaaaccacag

SEQ ID NO: 12499 - RNA, 19 nt, artificial
  Oligomer
cuauuuaggaaggcuguga

SEQ ID NO: 12500 - RNA, 19 nt, artificial
  Oligomer
gagcuauuuaggaaggcug

SEQ ID NO: 12501 - RNA, 19 nt, artificial
  Oligomer
gaaggagcuauuuaggaag

SEQ ID NO: 12502 - RNA, 19 nt, artificial
  Oligomer
gcgagaaggagcuauuuag

SEQ ID NO: 12503 - RNA, 19 nt, artificial
  Oligomer
cccugacugugcuugacuu

SEQ ID NO: 12504 - RNA, 19 nt, artificial
  Oligomer
gcuacugguuugagaacac

SEQ ID NO: 12505 - RNA, 19 nt, artificial
  Oligomer
ccauuguccucgaccaguu

SEQ ID NO: 12506 - RNA, 19 nt, artificial
  Oligomer
gggucugcaacaacuacug

SEQ ID NO: 12507 - RNA, 19 nt, artificial
  Oligomer
cuggugucuacaugagaaa

SEQ ID NO: 12508 - RNA, 19 nt, artificial
  Oligomer
ccuggugucuacaugagaa

SEQ ID NO: 12509 - RNA, 19 nt, artificial
  Oligomer
cugccagauauucaguacu

SEQ ID NO: 12510 - RNA, 19 nt, artificial
  Oligomer
ucuaauugacuuccacaaa

SEQ ID NO: 12511 - RNA, 19 nt, artificial
  Oligomer
caucucuaauugacuucca

SEQ ID NO: 12512 - RNA, 19 nt, artificial
  Oligomer
ccaaagaagauaaagacca

SEQ ID NO: 12513 - RNA, 19 nt, artificial
  Oligomer
cagugcaugaugauuauaa

SEQ ID NO: 12514 - RNA, 19 nt, artificial
  Oligomer
gcagugcaugaugauuaua

SEQ ID NO: 12515 - RNA, 19 nt, artificial
  Oligomer
ccaagaauguagagaaggc

SEQ ID NO: 12516 - RNA, 19 nt, artificial
  Oligomer
gcaauggcugugcuggaua

SEQ ID NO: 12517 - RNA, 19 nt, artificial
  Oligomer
ccaaggcuuugaguacaag

SEQ ID NO: 12518 - RNA, 19 nt, artificial
  Oligomer
gcaaucaucuauggaggug

SEQ ID NO: 12519 - RNA, 19 nt, artificial
  Oligomer
gucuacaucuucucaguca

SEQ ID NO: 12520 - RNA, 19 nt, artificial
  Oligomer
agacuuuccucaaccgcua

SEQ ID NO: 12521 - RNA, 19 nt, artificial
  Oligomer
gcaaccucauaaccuuccu

SEQ ID NO: 12522 - RNA, 19 nt, artificial
  Oligomer
cuaauguuuaccauguaug

SEQ ID NO: 12523 - RNA, 19 nt, artificial
  Oligomer
ccaucaucauccagcugcu

SEQ ID NO: 12524 - RNA, 19 nt, artificial
  Oligomer
agaagacaucugaacccaa

SEQ ID NO: 12525 - RNA, 19 nt, artificial
  Oligomer
cuacaaaagaaacucaaag

SEQ ID NO: 12526 - RNA, 19 nt, artificial
  Oligomer
gcuacaaaagaaacucaaa

SEQ ID NO: 12527 - RNA, 19 nt, artificial
  Oligomer
gcaacaacuacuggauucg

SEQ ID NO: 12528 - RNA, 19 nt, artificial
  Oligomer
ugcaacaacuacuggauuc

SEQ ID NO: 12529 - RNA, 19 nt, artificial
  Oligomer
ggugucuacaugagaaaug

SEQ ID NO: 12530 - RNA, 19 nt, artificial
  Oligomer
acaaaaucgaugcguugcu

SEQ ID NO: 12531 - RNA, 19 nt, artificial
  Oligomer
cccacaucucuaauugacu

SEQ ID NO: 12532 - RNA, 19 nt, artificial
  Oligomer
ugcagugcaugaugauuau

SEQ ID NO: 12533 - RNA, 19 nt, artificial
  Oligomer
ccaucagaauccaccuuag

SEQ ID NO: 12534 - RNA, 19 nt, artificial
  Oligomer
cccacuucaugcaccacua

SEQ ID NO: 12535 - RNA, 19 nt, artificial
  Oligomer
ggcuuugaguacaagucag

SEQ ID NO: 12536 - RNA, 19 nt, artificial
  Oligomer
gucccggcaaucaucuaug

SEQ ID NO: 12537 - RNA, 19 nt, artificial
  Oligomer
uggccaucauguaugucuu

SEQ ID NO: 12538 - RNA, 19 nt, artificial
  Oligomer
caacgucuuugugaaugau

SEQ ID NO: 12539 - RNA, 19 nt, artificial
  Oligomer
gcuguuguccuggccauuu

SEQ ID NO: 12540 - RNA, 19 nt, artificial
  Oligomer
agaucgugcuuacuacuau

SEQ ID NO: 12541 - RNA, 19 nt, artificial
  Oligomer
agaagagguuuggcaaaaa

SEQ ID NO: 12542 - RNA, 19 nt, artificial
  Oligomer
uggaaaugguauuagagau

SEQ ID NO: 12543 - RNA, 19 nt, artificial
  Oligomer
uggagguggaaaugguauu

SEQ ID NO: 12544 - RNA, 19 nt, artificial
  Oligomer
ggauuuucacuucaugcug

SEQ ID NO: 12545 - RNA, 19 nt, artificial
  Oligomer
ugacaugggaggauuuuca

SEQ ID NO: 12546 - RNA, 19 nt, artificial
  Oligomer
ugaagaaggaagcagccaa

SEQ ID NO: 12547 - RNA, 19 nt, artificial
  Oligomer
acaaaagaaacucaaagag

SEQ ID NO: 12548 - RNA, 19 nt, artificial
  Oligomer
cccuuagugagucugcuuc

SEQ ID NO: 12549 - RNA, 19 nt, artificial
  Oligomer
agcaaagauuuuaagagga

SEQ ID NO: 12550 - RNA, 19 nt, artificial
  Oligomer
ucagugccauuguccucga

SEQ ID NO: 12551 - RNA, 19 nt, artificial
  Oligomer
cugcaacaacuacuggauu

SEQ ID NO: 12552 - RNA, 19 nt, artificial
  Oligomer
ucagggucugcaacaacua

SEQ ID NO: 12553 - RNA, 19 nt, artificial
  Oligomer
cucucagggucugcaacaa

SEQ ID NO: 12554 - RNA, 19 nt, artificial
  Oligomer
ccaggucaagacauagaau

SEQ ID NO: 12555 - RNA, 19 nt, artificial
  Oligomer
cccugauauucuugauguc

SEQ ID NO: 12556 - RNA, 19 nt, artificial
  Oligomer
cacaucucuaauugacuuc

SEQ ID NO: 12557 - RNA, 19 nt, artificial
  Oligomer
uggaggugaaaagguacaa

SEQ ID NO: 12558 - RNA, 19 nt, artificial
  Oligomer
ucccaaagaagauaaagac

SEQ ID NO: 12559 - RNA, 19 nt, artificial
  Oligomer
aggagacuauguucuacaa

SEQ ID NO: 12560 - RNA, 19 nt, artificial
  Oligomer
gacccagacaauuauacaa

SEQ ID NO: 12561 - RNA, 19 nt, artificial
  Oligomer
cccggcaaucaucuaugga

SEQ ID NO: 12562 - RNA, 19 nt, artificial
  Oligomer
gcccacuuuccacaucuac

SEQ ID NO: 12563 - RNA, 19 nt, artificial
  Oligomer
ucaucauccauggcagcua

SEQ ID NO: 12564 - RNA, 19 nt, artificial
  Oligomer
uccuggccaucauguaugu

SEQ ID NO: 12565 - RNA, 19 nt, artificial
  Oligomer
agaaguucuauuggugguu

SEQ ID NO: 12566 - RNA, 19 nt, artificial
  Oligomer
cccaacgucuuugugaaug

SEQ ID NO: 12567 - RNA, 19 nt, artificial
  Oligomer
cuuauaucuugcucaccau

SEQ ID NO: 12568 - RNA, 19 nt, artificial
  Oligomer
gugcuuacuacuauggcuu

SEQ ID NO: 12569 - RNA, 19 nt, artificial
  Oligomer
aggauuuucacuucaugcu

SEQ ID NO: 12570 - RNA, 19 nt, artificial
  Oligomer
ugggaggauuuucacuuca

SEQ ID NO: 12571 - RNA, 19 nt, artificial
  Oligomer
ccagagagaaaggugagag

SEQ ID NO: 12572 - RNA, 19 nt, artificial
  Oligomer
gcuguuuaguucugaagag

SEQ ID NO: 12573 - RNA, 19 nt, artificial
  Oligomer
gucaaccucauccugucca

SEQ ID NO: 12574 - RNA, 19 nt, artificial
  Oligomer
cgagaacacaagaagcuac

SEQ ID NO: 12575 - RNA, 19 nt, artificial
  Oligomer
ccaaugucuuugucuggca

SEQ ID NO: 12576 - RNA, 19 nt, artificial
  Oligomer
acauccgaaauaccacccu

SEQ ID NO: 12577 - RNA, 19 nt, artificial
  Oligomer
gaagcaaagauuuuaagag

SEQ ID NO: 12578 - RNA, 19 nt, artificial
  Oligomer
cacagaagcaaagauuuua

SEQ ID NO: 12579 - RNA, 19 nt, artificial
  Oligomer
gugaucucaacccuaaugu

SEQ ID NO: 12580 - RNA, 19 nt, artificial
  Oligomer
ggcaaauucucccguacag

SEQ ID NO: 12581 - RNA, 19 nt, artificial
  Oligomer
acuacuggauucgggagaa

SEQ ID NO: 12582 - RNA, 19 nt, artificial
  Oligomer
ucugcaacaacuacuggau

SEQ ID NO: 12583 - RNA, 19 nt, artificial
  Oligomer
agggucugcaacaacuacu

SEQ ID NO: 12584 - RNA, 19 nt, artificial
  Oligomer
cucagggucugcaacaacu

SEQ ID NO: 12585 - RNA, 19 nt, artificial
  Oligomer
cccuggugucuacaugaga

SEQ ID NO: 12586 - RNA, 19 nt, artificial
  Oligomer
gcugagcuguaaaauauuu

SEQ ID NO: 12587 - RNA, 19 nt, artificial
  Oligomer
uccauacucagcucuuuaa

SEQ ID NO: 12588 - RNA, 19 nt, artificial
  Oligomer
ucgaugcguugcuuuggua

SEQ ID NO: 12589 - RNA, 19 nt, artificial
  Oligomer
gugaaaagguacaauagug

SEQ ID NO: 12590 - RNA, 19 nt, artificial
  Oligomer
ggugaaaagguacaauagu

SEQ ID NO: 12591 - RNA, 19 nt, artificial
  Oligomer
uccaucagaauccaccuua

SEQ ID NO: 12592 - RNA, 19 nt, artificial
  Oligomer
ccacuucaugcaccacuau

SEQ ID NO: 12593 - RNA, 19 nt, artificial
  Oligomer
gaaugaccaagaauguaga

SEQ ID NO: 12594 - RNA, 19 nt, artificial
  Oligomer
ccaaaugcuguguaagaag

SEQ ID NO: 12595 - RNA, 19 nt, artificial
  Oligomer
caauggcugugcuggauac

SEQ ID NO: 12596 - RNA, 19 nt, artificial
  Oligomer
caaucaucuauggagguga

SEQ ID NO: 12597 - RNA, 19 nt, artificial
  Oligomer
ggcaaucaucuauggaggu

SEQ ID NO: 12598 - RNA, 19 nt, artificial
  Oligomer
cggcaaucaucuauggagg

SEQ ID NO: 12599 - RNA, 19 nt, artificial
  Oligomer
cccacuuuccacaucuacu

SEQ ID NO: 12600 - RNA, 19 nt, artificial
  Oligomer
ucauaaccuuccugcgaga

SEQ ID NO: 12601 - RNA, 19 nt, artificial
  Oligomer
gcugacaugggaggauuuu

SEQ ID NO: 12602 - RNA, 19 nt, artificial
  Oligomer
ccaaggacgaauucuucac

SEQ ID NO: 12603 - RNA, 19 nt, artificial
  Oligomer
ccgucuaauguuuaccaug

SEQ ID NO: 12604 - RNA, 19 nt, artificial
  Oligomer
guuuaguucugaagaggaa

SEQ ID NO: 12605 - RNA, 19 nt, artificial
  Oligomer
gcugcuguuuaguucugaa

SEQ ID NO: 12606 - RNA, 19 nt, artificial
  Oligomer
ugcugcucaagaucccuaa

SEQ ID NO: 12607 - RNA, 19 nt, artificial
  Oligomer
uuaagaggaaagaagacau

SEQ ID NO: 12608 - RNA, 19 nt, artificial
  Oligomer
gcagcccaaugucuuuguc

SEQ ID NO: 12609 - RNA, 19 nt, artificial
  Oligomer
cagaagcaaagauuuuaag

SEQ ID NO: 12610 - RNA, 19 nt, artificial
  Oligomer
ccuccauacucagcucuuu

SEQ ID NO: 12611 - RNA, 19 nt, artificial
  Oligomer
cccuccauacucagcucuu

SEQ ID NO: 12612 - RNA, 19 nt, artificial
  Oligomer
cagauauucaguacucgau

SEQ ID NO: 12613 - RNA, 19 nt, artificial
  Oligomer
cagcccugauauucuugau

SEQ ID NO: 12614 - RNA, 19 nt, artificial
  Oligomer
ccagcccugauauucuuga

SEQ ID NO: 12615 - RNA, 19 nt, artificial
  Oligomer
gagggcaccaggaaacaaa

SEQ ID NO: 12616 - RNA, 19 nt, artificial
  Oligomer
cgaugcguugcuuugguau

SEQ ID NO: 12617 - RNA, 19 nt, artificial
  Oligomer
guguggaggugaaaaggua

SEQ ID NO: 12618 - RNA, 19 nt, artificial
  Oligomer
caaagaagauaaagaccac

SEQ ID NO: 12619 - RNA, 19 nt, artificial
  Oligomer
gcaugaugauuauaagucc

SEQ ID NO: 12620 - RNA, 19 nt, artificial
  Oligomer
ugcaccacuaugagaacuu

SEQ ID NO: 12621 - RNA, 19 nt, artificial
  Oligomer
uggcauaaauuugaggugu

SEQ ID NO: 12622 - RNA, 19 nt, artificial
  Oligomer
ucgccaccuaccagaacau

SEQ ID NO: 12623 - RNA, 19 nt, artificial
  Oligomer
ggaguggcauaaauuugag

SEQ ID NO: 12624 - RNA, 19 nt, artificial
  Oligomer
cugcccacuuuccacaucu

SEQ ID NO: 12625 - RNA, 19 nt, artificial
  Oligomer
ucuaugcccugcucaucau

SEQ ID NO: 12626 - RNA, 19 nt, artificial
  Oligomer
accucuacauccugcucua

SEQ ID NO: 12627 - RNA, 19 nt, artificial
  Oligomer
ccaucauguaugucuucgc

SEQ ID NO: 12628 - RNA, 19 nt, artificial
  Oligomer
ggccaucauguaugucuuc

SEQ ID NO: 12629 - RNA, 19 nt, artificial
  Oligomer
cuggccaucauguaugucu

SEQ ID NO: 12630 - RNA, 19 nt, artificial
  Oligomer
guccuggccaucauguaug

SEQ ID NO: 12631 - RNA, 19 nt, artificial
  Oligomer
gguccuggccaucauguau

SEQ ID NO: 12632 - RNA, 19 nt, artificial
  Oligomer
gaaguucuauuggugguuc

SEQ ID NO: 12633 - RNA, 19 nt, artificial
  Oligomer
ccuuccugcgagagacuuu

SEQ ID NO: 12634 - RNA, 19 nt, artificial
  Oligomer
cucauaaccuuccugcgag

SEQ ID NO: 12635 - RNA, 19 nt, artificial
  Oligomer
cgcaaccucauaaccuucc

SEQ ID NO: 12636 - RNA, 19 nt, artificial
  Oligomer
ccgcaaccucauaaccuuc

SEQ ID NO: 12637 - RNA, 19 nt, artificial
  Oligomer
cuccuucauguucucuuau

SEQ ID NO: 12638 - RNA, 19 nt, artificial
  Oligomer
gcuuacuacuauggcuuug

SEQ ID NO: 12639 - RNA, 19 nt, artificial
  Oligomer
ugcuuacuacuauggcuuu

SEQ ID NO: 12640 - RNA, 19 nt, artificial
  Oligomer
cgugcuuacuacuauggcu

SEQ ID NO: 12641 - RNA, 19 nt, artificial
  Oligomer
gaagagguuuggcaaaaag

SEQ ID NO: 12642 - RNA, 19 nt, artificial
  Oligomer
agguggaaaugguauuaga

SEQ ID NO: 12643 - RNA, 19 nt, artificial
  Oligomer
gagguggaaaugguauuag

SEQ ID NO: 12644 - RNA, 19 nt, artificial
  Oligomer
guaugaccuggaugagaau

SEQ ID NO: 12645 - RNA, 19 nt, artificial
  Oligomer
ucccgucuaauguuuacca

SEQ ID NO: 12646 - RNA, 19 nt, artificial
  Oligomer
uggcugacaaggauggcaa

SEQ ID NO: 12647 - RNA, 19 nt, artificial
  Oligomer
aacacaagaagcuacaaaa

SEQ ID NO: 12648 - RNA, 19 nt, artificial
  Oligomer
agaacacaagaagcuacaa

SEQ ID NO: 12649 - RNA, 19 nt, artificial
  Oligomer
gccgagaacacaagaagcu

SEQ ID NO: 12650 - RNA, 19 nt, artificial
  Oligomer
auugaagacauccgaaaua

SEQ ID NO: 12651 - RNA, 19 nt, artificial
  Oligomer
ccuguucagugccauuguc

SEQ ID NO: 12652 - RNA, 19 nt, artificial
  Oligomer
ggacaacauagugguugaa

SEQ ID NO: 12653 - RNA, 19 nt, artificial
  Oligomer
gcaagaaguagagcacaga

SEQ ID NO: 12654 - RNA, 19 nt, artificial
  Oligomer
ggcaagaaguagagcacag

SEQ ID NO: 12655 - RNA, 19 nt, artificial
  Oligomer
ccaaucugaacaguaccca

SEQ ID NO: 12656 - RNA, 19 nt, artificial
  Oligomer
gguuuucaaagcucccaag

SEQ ID NO: 12657 - RNA, 19 nt, artificial
  Oligomer
acaaggguuuucaaagcuc

SEQ ID NO: 12658 - RNA, 19 nt, artificial
  Oligomer
agaaaugccagcugucauu

SEQ ID NO: 12659 - RNA, 19 nt, artificial
  Oligomer
uggugucuacaugagaaau

SEQ ID NO: 12660 - RNA, 19 nt, artificial
  Oligomer
gucaagacauagaauguuu

SEQ ID NO: 12661 - RNA, 19 nt, artificial
  Oligomer
ggucaagacauagaauguu

SEQ ID NO: 12662 - RNA, 19 nt, artificial
  Oligomer
ccauacucagcucuuuaac

SEQ ID NO: 12663 - RNA, 19 nt, artificial
  Oligomer
ugagggugaaggcaagaag

SEQ ID NO: 12664 - RNA, 19 nt, artificial
  Oligomer
gggcaccaggaaacaaaga

SEQ ID NO: 12665 - RNA, 19 nt, artificial
  Oligomer
gugagggugaaggcaagaa

SEQ ID NO: 12666 - RNA, 19 nt, artificial
  Oligomer
ggacugacauuugagggag

SEQ ID NO: 12667 - RNA, 19 nt, artificial
  Oligomer
caaguguggaggugaaaag

SEQ ID NO: 12668 - RNA, 19 nt, artificial
  Oligomer
gacaaguguggaggugaaa

SEQ ID NO: 12669 - RNA, 19 nt, artificial
  Oligomer
agaaaaggcaggagacuau

SEQ ID NO: 12670 - RNA, 19 nt, artificial
  Oligomer
cuccaucagaauccaccuu

SEQ ID NO: 12671 - RNA, 19 nt, artificial
  Oligomer
acauuuaugucacccagcu

SEQ ID NO: 12672 - RNA, 19 nt, artificial
  Oligomer
uggucuucaagucauccuu

SEQ ID NO: 12673 - RNA, 19 nt, artificial
  Oligomer
cuggaagagugagggugaa

SEQ ID NO: 12674 - RNA, 19 nt, artificial
  Oligomer
ucaucuauggaggugacaa

SEQ ID NO: 12675 - RNA, 19 nt, artificial
  Oligomer
ugacccaccaccucuacau

SEQ ID NO: 12676 - RNA, 19 nt, artificial
  Oligomer
ccauguucuuuccgacgug

SEQ ID NO: 12677 - RNA, 19 nt, artificial
  Oligomer
caaccgcuaugugccuuuu

SEQ ID NO: 12678 - RNA, 19 nt, artificial
  Oligomer
gacuuuccucaaccgcuau

SEQ ID NO: 12679 - RNA, 19 nt, artificial
  Oligomer
caaccucauaaccuuccug

SEQ ID NO: 12680 - RNA, 19 nt, artificial
  Oligomer
ucuccuucauguucucuua

SEQ ID NO: 12681 - RNA, 19 nt, artificial
  Oligomer
gucuccuucauguucucuu

SEQ ID NO: 12682 - RNA, 19 nt, artificial
  Oligomer
ccagcgucuccuucauguu

SEQ ID NO: 12683 - RNA, 19 nt, artificial
  Oligomer
caugggaggauuuucacuu

SEQ ID NO: 12684 - RNA, 19 nt, artificial
  Oligomer
agcugacaugggaggauuu

SEQ ID NO: 12685 - RNA, 19 nt, artificial
  Oligomer
gcuaugacggcugguuuaa

SEQ ID NO: 12686 - RNA, 19 nt, artificial
  Oligomer
gucccaucaucauccagcu

SEQ ID NO: 12687 - RNA, 19 nt, artificial
  Oligomer
caaaagaaacucaaagaga

SEQ ID NO: 12688 - RNA, 19 nt, artificial
  Oligomer
acacaagaagcuacaaaag

SEQ ID NO: 12689 - RNA, 19 nt, artificial
  Oligomer
gagaacacaagaagcuaca

SEQ ID NO: 12690 - RNA, 19 nt, artificial
  Oligomer
ccgagaacacaagaagcua

SEQ ID NO: 12691 - RNA, 19 nt, artificial
  Oligomer
gacugugcuugacuucuuu

SEQ ID NO: 12692 - RNA, 19 nt, artificial
  Oligomer
caaugucuuugucuggcau

SEQ ID NO: 12693 - RNA, 19 nt, artificial
  Oligomer
cccuguucagugccauugu

SEQ ID NO: 12694 - RNA, 19 nt, artificial
  Oligomer
cuaaaaagcugagcuguaa

SEQ ID NO: 12695 - RNA, 19 nt, artificial
  Oligomer
ugcaucuacuggagugguc

SEQ ID NO: 12696 - RNA, 19 nt, artificial
  Oligomer
ccucucugcaucuacugga

SEQ ID NO: 12697 - RNA, 19 nt, artificial
  Oligomer
ugcguugcuuugguauuug

SEQ ID NO: 12698 - RNA, 19 nt, artificial
  Oligomer
guggaggugaaaagguaca

SEQ ID NO: 12699 - RNA, 19 nt, artificial
  Oligomer
acaaguguggaggugaaaa

SEQ ID NO: 12700 - RNA, 19 nt, artificial
  Oligomer
ugcaugaugauuauaaguc

SEQ ID NO: 12701 - RNA, 19 nt, artificial
  Oligomer
agugcaugaugauuauaag

SEQ ID NO: 12702 - RNA, 19 nt, artificial
  Oligomer
caaaugagaaaaggcagga

SEQ ID NO: 12703 - RNA, 19 nt, artificial
  Oligomer
ugccuucucuucugugcac

SEQ ID NO: 12704 - RNA, 19 nt, artificial
  Oligomer
ccacuaugagaacuucuga

SEQ ID NO: 12705 - RNA, 19 nt, artificial
  Oligomer
agaauguagagaaggccug

SEQ ID NO: 12706 - RNA, 19 nt, artificial
  Oligomer
acaucgcuguguaugagug

SEQ ID NO: 12707 - RNA, 19 nt, artificial
  Oligomer
guggcauaaauuugaggug

SEQ ID NO: 12708 - RNA, 19 nt, artificial
  Oligomer
gagugaccuaccugcaauu

SEQ ID NO: 12709 - RNA, 19 nt, artificial
  Oligomer
ccucuacauccugcucuau

SEQ ID NO: 12710 - RNA, 19 nt, artificial
  Oligomer
gccaucauguaugucuucg

SEQ ID NO: 12711 - RNA, 19 nt, artificial
  Oligomer
agguaugacaggugugcuu

SEQ ID NO: 12712 - RNA, 19 nt, artificial
  Oligomer
cagaaguucuauugguggu

SEQ ID NO: 12713 - RNA, 19 nt, artificial
  Oligomer
ucuuauaucuugcucacca

SEQ ID NO: 12714 - RNA, 19 nt, artificial
  Oligomer
cagaucgugcuuacuacua

SEQ ID NO: 12715 - RNA, 19 nt, artificial
  Oligomer
gcaaucuucucggccaucu

SEQ ID NO: 12716 - RNA, 19 nt, artificial
  Oligomer
aggcgcugcaagagaagau

SEQ ID NO: 12717 - RNA, 19 nt, artificial
  Oligomer
cagagagaaaggugagagu

SEQ ID NO: 12718 - RNA, 19 nt, artificial
  Oligomer
uguucucucuggcugacaa

SEQ ID NO: 12719 - RNA, 19 nt, artificial
  Oligomer
acauguuuguggaguccau

SEQ ID NO: 12720 - RNA, 19 nt, artificial
  Oligomer
cugcuguuuaguucugaag

SEQ ID NO: 12721 - RNA, 19 nt, artificial
  Oligomer
gaaggcaagaaguagagca

SEQ ID NO: 12722 - RNA, 19 nt, artificial
  Oligomer
agggugaaggcaagaagua

SEQ ID NO: 12723 - RNA, 19 nt, artificial
  Oligomer
ccuagaagcaaccacugau

SEQ ID NO: 12724 - RNA, 19 nt, artificial
  Oligomer
aagcugagcuguaaaauau

SEQ ID NO: 12725 - RNA, 19 nt, artificial
  Oligomer
cugauauucuugaugucac

SEQ ID NO: 12726 - RNA, 19 nt, artificial
  Oligomer
agcccugauauucuugaug

SEQ ID NO: 12727 - RNA, 19 nt, artificial
  Oligomer
cugugaugcuuagaaccug

SEQ ID NO: 12728 - RNA, 19 nt, artificial
  Oligomer
augcguugcuuugguauuu

SEQ ID NO: 12729 - RNA, 19 nt, artificial
  Oligomer
caggagacuauguucuaca

SEQ ID NO: 12730 - RNA, 19 nt, artificial
  Oligomer
ucgcuguguaugaguggcu

SEQ ID NO: 12731 - RNA, 19 nt, artificial
  Oligomer
ucauguaugucuucgccuc

SEQ ID NO: 12732 - RNA, 19 nt, artificial
  Oligomer
cagucaaugucuacaucuu

SEQ ID NO: 12733 - RNA, 19 nt, artificial
  Oligomer
acgguguguaucaggcucu

SEQ ID NO: 12734 - RNA, 19 nt, artificial
  Oligomer
acaagcgcuucguggagaa

SEQ ID NO: 12735 - RNA, 19 nt, artificial
  Oligomer
caagagaagaugcagcgag

SEQ ID NO: 12736 - RNA, 19 nt, artificial
  Oligomer
ggacugaagaagagguuug

SEQ ID NO: 12737 - RNA, 19 nt, artificial
  Oligomer
accuggugcugcuguuuag

SEQ ID NO: 12738 - RNA, 19 nt, artificial
  Oligomer
ugaccuggugcugcuguuu

SEQ ID NO: 12739 - RNA, 19 nt, artificial
  Oligomer
ucaccaucauugcucucug

SEQ ID NO: 12740 - RNA, 19 nt, artificial
  Oligomer
gccaucaccaucauugcuc

SEQ ID NO: 12741 - RNA, 19 nt, artificial
  Oligomer
gucuuugucuggcauaaag

SEQ ID NO: 12742 - RNA, 19 nt, artificial
  Oligomer
agcccaaugucuuugucug

SEQ ID NO: 12743 - RNA, 19 nt, artificial
  Oligomer
gcaaauucucccguacaga

SEQ ID NO: 12744 - RNA, 19 nt, artificial
  Oligomer
caagaaguagagcacagaa

SEQ ID NO: 12745 - RNA, 19 nt, artificial
  Oligomer
caggucaagacauagaaug

SEQ ID NO: 12746 - RNA, 19 nt, artificial
  Oligomer
agcugagcuguaaaauauu

SEQ ID NO: 12747 - RNA, 19 nt, artificial
  Oligomer
ccuaaaaagcugagcugua

SEQ ID NO: 12748 - RNA, 19 nt, artificial
  Oligomer
cuccauacucagcucuuua

SEQ ID NO: 12749 - RNA, 19 nt, artificial
  Oligomer
ugcuuggacugacauuuga

SEQ ID NO: 12750 - RNA, 19 nt, artificial
  Oligomer
gcuuugguauuugcuugga

SEQ ID NO: 12751 - RNA, 19 nt, artificial
  Oligomer
aaaagguacaauagugcuu

SEQ ID NO: 12752 - RNA, 19 nt, artificial
  Oligomer
accacuaugagaacuucug

SEQ ID NO: 12753 - RNA, 19 nt, artificial
  Oligomer
ccuucuucaacucccugca

SEQ ID NO: 12754 - RNA, 19 nt, artificial
  Oligomer
cuggucuucaagucauccu

SEQ ID NO: 12755 - RNA, 19 nt, artificial
  Oligomer
ugaccuaccugcaauucca

SEQ ID NO: 12756 - RNA, 19 nt, artificial
  Oligomer
ucucuuauaucuugcucac

SEQ ID NO: 12757 - RNA, 19 nt, artificial
  Oligomer
ucguguguguggcaaucuu

SEQ ID NO: 12758 - RNA, 19 nt, artificial
  Oligomer
aagaagagguuuggcaaaa

SEQ ID NO: 12759 - RNA, 19 nt, artificial
  Oligomer
gaagaagagguuuggcaaa

SEQ ID NO: 12760 - RNA, 19 nt, artificial
  Oligomer
cugugucaaagguggaggu

SEQ ID NO: 12761 - RNA, 19 nt, artificial
  Oligomer
cugguggucuucaugaaag

SEQ ID NO: 12762 - RNA, 19 nt, artificial
  Oligomer
cuggugcugcuguuuaguu

SEQ ID NO: 12763 - RNA, 19 nt, artificial
  Oligomer
guuuugccaucaccaucau

SEQ ID NO: 12764 - RNA, 19 nt, artificial
  Oligomer
ugcagcccaaugucuuugu

SEQ ID NO: 12765 - RNA, 19 nt, artificial
  Oligomer
agauuucggaguuggagga

SEQ ID NO: 12766 - RNA, 19 nt, artificial
  Oligomer
cccaaucugaacaguaccc

SEQ ID NO: 12767 - RNA, 19 nt, artificial
  Oligomer
cuagaagcaaccacugaug

SEQ ID NO: 12768 - RNA, 19 nt, artificial
  Oligomer
ucaagacauagaauguuuc

SEQ ID NO: 12769 - RNA, 19 nt, artificial
  Oligomer
gugaugcuuagaaccugga

SEQ ID NO: 12770 - RNA, 19 nt, artificial
  Oligomer
cacuaugagaacuucugag

SEQ ID NO: 12771 - RNA, 19 nt, artificial
  Oligomer
cuauggaggugacaagcug

SEQ ID NO: 12772 - RNA, 19 nt, artificial
  Oligomer
caccucuacauccugcucu

SEQ ID NO: 12773 - RNA, 19 nt, artificial
  Oligomer
accauguucuuuccgacgu

SEQ ID NO: 12774 - RNA, 19 nt, artificial
  Oligomer
agagaaaggugagagugca

SEQ ID NO: 12775 - RNA, 19 nt, artificial
  Oligomer
acaucguguguguggcaau

SEQ ID NO: 12776 - RNA, 19 nt, artificial
  Oligomer
gagucuauguuccgggagu

SEQ ID NO: 12777 - RNA, 19 nt, artificial
  Oligomer
guggucuucaugaaaggcu

SEQ ID NO: 12778 - RNA, 19 nt, artificial
  Oligomer
uguuuguggaguccauguu

SEQ ID NO: 12779 - RNA, 19 nt, artificial
  Oligomer
cagacaccuuuuugcucag

SEQ ID NO: 12780 - RNA, 19 nt, artificial
  Oligomer
ucagacaccuuuuugcuca

SEQ ID NO: 12781 - RNA, 19 nt, artificial
  Oligomer
gccuucccuuagugagucu

SEQ ID NO: 12782 - RNA, 19 nt, artificial
  Oligomer
cugugcuugacuucuuuga

SEQ ID NO: 12783 - RNA, 19 nt, artificial
  Oligomer
cucccguacagacuaugug

SEQ ID NO: 12784 - RNA, 19 nt, artificial
  Oligomer
ccagauuucggaguuggag

SEQ ID NO: 12785 - RNA, 19 nt, artificial
  Oligomer
gagaaaugccagcugucau

SEQ ID NO: 12786 - RNA, 19 nt, artificial
  Oligomer
aaaaagcugagcuguaaaa

SEQ ID NO: 12787 - RNA, 19 nt, artificial
  Oligomer
cuugaugucaccagugaua

SEQ ID NO: 12788 - RNA, 19 nt, artificial
  Oligomer
ccugauauucuugauguca

SEQ ID NO: 12789 - RNA, 19 nt, artificial
  Oligomer
uggacugacauuugaggga

SEQ ID NO: 12790 - RNA, 19 nt, artificial
  Oligomer
guauuugcuuggacugaca

SEQ ID NO: 12791 - RNA, 19 nt, artificial
  Oligomer
aaguccaccuguuuaucaa

SEQ ID NO: 12792 - RNA, 19 nt, artificial
  Oligomer
agagugagggugaaggcaa

SEQ ID NO: 12793 - RNA, 19 nt, artificial
  Oligomer
ugauuauaaguccaccugu

SEQ ID NO: 12794 - RNA, 19 nt, artificial
  Oligomer
cuucucuucugugcaccua

SEQ ID NO: 12795 - RNA, 19 nt, artificial
  Oligomer
agcccuucuucaacucccu

SEQ ID NO: 12796 - RNA, 19 nt, artificial
  Oligomer
agaaagugcugaaccggag

SEQ ID NO: 12797 - RNA, 19 nt, artificial
  Oligomer
ccuuugccuccauccucaa

SEQ ID NO: 12798 - RNA, 19 nt, artificial
  Oligomer
ccuugauggaccguuugga

SEQ ID NO: 12799 - RNA, 19 nt, artificial
  Oligomer
cuaccauguucuuuccgac

SEQ ID NO: 12800 - RNA, 19 nt, artificial
  Oligomer
gcuaccauguucuuuccga

SEQ ID NO: 12801 - RNA, 19 nt, artificial
  Oligomer
uugugaaugauggguccaa

SEQ ID NO: 12802 - RNA, 19 nt, artificial
  Oligomer
guguguaucaggcucugga

SEQ ID NO: 12803 - RNA, 19 nt, artificial
  Oligomer
gcugucgagucucguucau

SEQ ID NO: 12804 - RNA, 19 nt, artificial
  Oligomer
uggucuucaugaaaggcuc

SEQ ID NO: 12805 - RNA, 19 nt, artificial
  Oligomer
ccaggacauguuuguggag

SEQ ID NO: 12806 - RNA, 19 nt, artificial
  Oligomer
uggugcugcuguuuaguuc

SEQ ID NO: 12807 - RNA, 19 nt, artificial
  Oligomer
ucauugcucucugcugccu

SEQ ID NO: 12808 - RNA, 19 nt, artificial
  Oligomer
ugucuuugucuggcauaaa

SEQ ID NO: 12809 - RNA, 19 nt, artificial
  Oligomer
augucuuugucuggcauaa

SEQ ID NO: 12810 - RNA, 19 nt, artificial
  Oligomer
ccugcagcccaaugucuuu

SEQ ID NO: 12811 - RNA, 19 nt, artificial
  Oligomer
aggaggugaaugagcugcu

SEQ ID NO: 12812 - RNA, 19 nt, artificial
  Oligomer
cagcugucauuuccggaag

SEQ ID NO: 12813 - RNA, 19 nt, artificial
  Oligomer
ucgggcucuuuccuaaaaa

SEQ ID NO: 12814 - RNA, 19 nt, artificial
  Oligomer
gguauuugcuuggacugac

SEQ ID NO: 12815 - RNA, 19 nt, artificial
  Oligomer
aaaggcaggagacuauguu

SEQ ID NO: 12816 - RNA, 19 nt, artificial
  Oligomer
ggagaauauugacccagac

SEQ ID NO: 12817 - RNA, 19 nt, artificial
  Oligomer
ugaagaagagguuuggcaa

SEQ ID NO: 12818 - RNA, 19 nt, artificial
  Oligomer
cugaagaagagguuuggca

SEQ ID NO: 12819 - RNA, 19 nt, artificial
  Oligomer
ggagcucuucugacuggau

SEQ ID NO: 12820 - RNA, 19 nt, artificial
  Oligomer
caggacauguuuguggagu

SEQ ID NO: 12821 - RNA, 19 nt, artificial
  Oligomer
ggaauuugugguggccucu

SEQ ID NO: 12822 - RNA, 19 nt, artificial
  Oligomer
aggcaggagacuauguucu

SEQ ID NO: 12823 - RNA, 19 nt, artificial
  Oligomer
gagaacuucugagccuguc

SEQ ID NO: 12824 - RNA, 19 nt, artificial
  Oligomer
uggagaucagcguggugaa

SEQ ID NO: 12825 - RNA, 19 nt, artificial
  Oligomer
acauugcacagaccacccu

SEQ ID NO: 12826 - RNA, 19 nt, artificial
  Oligomer
uggagguggagguggaaau

SEQ ID NO: 12827 - RNA, 19 nt, artificial
  Oligomer
cggaguuggaggacaacau

SEQ ID NO: 12828 - RNA, 19 nt, artificial
  Oligomer
uccacaaaaucgaugcguu

SEQ ID NO: 12829 - RNA, 19 nt, artificial
  Oligomer
gggagaauauugacccaga

SEQ ID NO: 12830 - RNA, 19 nt, artificial
  Oligomer
ccaggaaugaccaagaaug

SEQ ID NO: 12831 - RNA, 19 nt, artificial
  Oligomer
ucguucaucacucggacac

SEQ ID NO: 12832 - RNA, 19 nt, artificial
  Oligomer
gguggagguggaaauggua

SEQ ID NO: 12833 - RNA, 19 nt, artificial
  Oligomer
gcaauggcuaccuguccuu

SEQ ID NO: 12834 - RNA, 19 nt, artificial
  Oligomer
aggaaagaagacaucugaa

SEQ ID NO: 12835 - RNA, 19 nt, artificial
  Oligomer
cuggagugguggccuauuu

SEQ ID NO: 12836 - RNA, 19 nt, artificial
  Oligomer
agaggaaagaagacaucug

SEQ ID NO: 12837 - RNA, 19 nt, artificial
  Oligomer
ggaacuggagugaucucaa

SEQ ID NO: 12838 - RNA, 19 nt, artificial
  Oligomer
ggaguuggaggacaacaua

SEQ ID NO: 12839 - RNA, 19 nt, artificial
  Oligomer
ccagugcagaagcugugau

SEQ ID NO: 12840 - RNA, 19 nt, artificial
  Oligomer
ccagucaggaucucccaaa

SEQ ID NO: 12841 - RNA, 19 nt, artificial
  Oligomer
gcacauuuaugucacccag

SEQ ID NO: 12842 - RNA, 19 nt, artificial
  Oligomer
ggcagccaaaugcugugua

SEQ ID NO: 12843 - RNA, 19 nt, artificial
  Oligomer
gaguacaagucaggacagu

SEQ ID NO: 12844 - RNA, 19 nt, artificial
  Oligomer
cccaaggcuuugaguacaa

SEQ ID NO: 12845 - RNA, 19 nt, artificial
  Oligomer
cgcagucaaugucuacauc

SEQ ID NO: 12846 - RNA, 19 nt, artificial
  Oligomer
acgcagucaaugucuacau

SEQ ID NO: 12847 - RNA, 19 nt, artificial
  Oligomer
agguggagguggaaauggu

SEQ ID NO: 12848 - RNA, 19 nt, artificial
  Oligomer
ugccuucccuuagugaguc

SEQ ID NO: 12849 - RNA, 19 nt, artificial
  Oligomer
ccaguuuugguccuacuaa

SEQ ID NO: 12850 - RNA, 19 nt, artificial
  Oligomer
aucgggcucuuuccuaaaa

SEQ ID NO: 12851 - RNA, 19 nt, artificial
  Oligomer
cucugccagauauucagua

SEQ ID NO: 12852 - RNA, 19 nt, artificial
  Oligomer
aaaaggagcagcccuacuu

SEQ ID NO: 12853 - RNA, 19 nt, artificial
  Oligomer
ggaguauacaggauaccgu

SEQ ID NO: 12854 - RNA, 19 nt, artificial
  Oligomer
gcagucaaugucuacaucu

SEQ ID NO: 12855 - RNA, 19 nt, artificial
  Oligomer
gcagcucugugucaaaggu

SEQ ID NO: 12856 - RNA, 19 nt, artificial
  Oligomer
cuucuucagacaccuuuuu

SEQ ID NO: 12857 - RNA, 19 nt, artificial
  Oligomer
cugcugcucaagaucccua

SEQ ID NO: 12858 - RNA, 19 nt, artificial
  Oligomer
ggucgcuguuaucaacauu

SEQ ID NO: 12859 - RNA, 19 nt, artificial
  Oligomer
uccggaagguccugaacaa

SEQ ID NO: 12860 - RNA, 19 nt, artificial
  Oligomer
ggugaaggcaagaaguaga

SEQ ID NO: 12861 - RNA, 19 nt, artificial
  Oligomer
caaauccaguuuugguccu

SEQ ID NO: 12862 - RNA, 19 nt, artificial
  Oligomer
ugaugugauuucuaccaaa

SEQ ID NO: 12863 - RNA, 19 nt, artificial
  Oligomer
guacauguuuuaccaccac

SEQ ID NO: 12864 - RNA, 19 nt, artificial
  Oligomer
ucagcucuuuaacuuuucu

SEQ ID NO: 12865 - RNA, 19 nt, artificial
  Oligomer
ggaucucccaaagaagaua

SEQ ID NO: 12866 - RNA, 19 nt, artificial
  Oligomer
cccggaguauacaggauac

SEQ ID NO: 12867 - RNA, 19 nt, artificial
  Oligomer
caauugcagugcaugauga

SEQ ID NO: 12868 - RNA, 19 nt, artificial
  Oligomer
uacaauugcagugcaugau

SEQ ID NO: 12869 - RNA, 19 nt, artificial
  Oligomer
uucuacaauugcagugcau

SEQ ID NO: 12870 - RNA, 19 nt, artificial
  Oligomer
agaaaacacucccggagua

SEQ ID NO: 12871 - RNA, 19 nt, artificial
  Oligomer
accagaacaucgcugugua

SEQ ID NO: 12872 - RNA, 19 nt, artificial
  Oligomer
ccgcuaugugccuuuugau

SEQ ID NO: 12873 - RNA, 19 nt, artificial
  Oligomer
ccaaaagcugcagcaguac

SEQ ID NO: 12874 - RNA, 19 nt, artificial
  Oligomer
gagcucuucugacuggauc

SEQ ID NO: 12875 - RNA, 19 nt, artificial
  Oligomer
cucaggugcuggacaucaa

SEQ ID NO: 12876 - RNA, 19 nt, artificial
  Oligomer
ugagcgagaaggagcuauu

SEQ ID NO: 12877 - RNA, 19 nt, artificial
  Oligomer
ccaucaccaucauugcucu

SEQ ID NO: 12878 - RNA, 19 nt, artificial
  Oligomer
acgugcuggucgcuguuau

SEQ ID NO: 12879 - RNA, 19 nt, artificial
  Oligomer
cgcuacugguuugagaaca

SEQ ID NO: 12880 - RNA, 19 nt, artificial
  Oligomer
aggacaacauagugguuga

SEQ ID NO: 12881 - RNA, 19 nt, artificial
  Oligomer
gugaaggcaagaaguagag

SEQ ID NO: 12882 - RNA, 19 nt, artificial
  Oligomer
agguccugaacaaggguuu

SEQ ID NO: 12883 - RNA, 19 nt, artificial
  Oligomer
aaauccaguuuugguccua

SEQ ID NO: 12884 - RNA, 19 nt, artificial
  Oligomer
cgggcucuuuccuaaaaag

SEQ ID NO: 12885 - RNA, 19 nt, artificial
  Oligomer
cagucaggaucucccaaag

SEQ ID NO: 12886 - RNA, 19 nt, artificial
  Oligomer
ccaauauugggagaauauu

SEQ ID NO: 12887 - RNA, 19 nt, artificial
  Oligomer
cccaauauugggagaauau

SEQ ID NO: 12888 - RNA, 19 nt, artificial
  Oligomer
gcuuccaguauccugccuu

SEQ ID NO: 12889 - RNA, 19 nt, artificial
  Oligomer
ccaccaugcuauacaucug

SEQ ID NO: 12890 - RNA, 19 nt, artificial
  Oligomer
gcagccaaaugcuguguaa

SEQ ID NO: 12891 - RNA, 19 nt, artificial
  Oligomer
ucaaccgcuaugugccuuu

SEQ ID NO: 12892 - RNA, 19 nt, artificial
  Oligomer
gcgucuccuucauguucuc

SEQ ID NO: 12893 - RNA, 19 nt, artificial
  Oligomer
cuggacugaagaagagguu

SEQ ID NO: 12894 - RNA, 19 nt, artificial
  Oligomer
aggugguggagucuauguu

SEQ ID NO: 12895 - RNA, 19 nt, artificial
  Oligomer
ggaugagaauggcuuccuc

SEQ ID NO: 12896 - RNA, 19 nt, artificial
  Oligomer
uaccauguaugaccuggau

SEQ ID NO: 12897 - RNA, 19 nt, artificial
  Oligomer
ugcagcaggucaaccucau

SEQ ID NO: 12898 - RNA, 19 nt, artificial
  Oligomer
agcuacaaaagaaacucaa

SEQ ID NO: 12899 - RNA, 19 nt, artificial
  Oligomer
gagucugcuucucucugga

SEQ ID NO: 12900 - RNA, 19 nt, artificial
  Oligomer
ccucaaccuaagcagcuca

SEQ ID NO: 12901 - RNA, 19 nt, artificial
  Oligomer
gguuugagaacaccaggaa

SEQ ID NO: 12902 - RNA, 19 nt, artificial
  Oligomer
ccuggcaaauucucccgua

SEQ ID NO: 12903 - RNA, 19 nt, artificial
  Oligomer
ggguuuucaaagcucccaa

SEQ ID NO: 12904 - RNA, 19 nt, artificial
  Oligomer
gaugugauuucuaccaaau

SEQ ID NO: 12905 - RNA, 19 nt, artificial
  Oligomer
cccaggucaagacauagaa

SEQ ID NO: 12906 - RNA, 19 nt, artificial
  Oligomer
cagcucuuuaacuuuucuu

SEQ ID NO: 12907 - RNA, 19 nt, artificial
  Oligomer
cucagcucuuuaacuuuuc

SEQ ID NO: 12908 - RNA, 19 nt, artificial
  Oligomer
acucagcucuuuaacuuuu

SEQ ID NO: 12909 - RNA, 19 nt, artificial
  Oligomer
gaagcugugaugcuuagaa

SEQ ID NO: 12910 - RNA, 19 nt, artificial
  Oligomer
cccagcuuccugcagaaaa

SEQ ID NO: 12911 - RNA, 19 nt, artificial
  Oligomer
cucaggaccaccaugcuau

SEQ ID NO: 12912 - RNA, 19 nt, artificial
  Oligomer
uggugucugugcacauuua

SEQ ID NO: 12913 - RNA, 19 nt, artificial
  Oligomer
ccagaacaucgcuguguau

SEQ ID NO: 12914 - RNA, 19 nt, artificial
  Oligomer
ucaggaguggcauaaauuu

SEQ ID NO: 12915 - RNA, 19 nt, artificial
  Oligomer
ccacaucuacuuccugguc

SEQ ID NO: 12916 - RNA, 19 nt, artificial
  Oligomer
gcagcuaugcucugaucca

SEQ ID NO: 12917 - RNA, 19 nt, artificial
  Oligomer
accgcuaugugccuuuuga

SEQ ID NO: 12918 - RNA, 19 nt, artificial
  Oligomer
gaggcuuccuagcccaaaa

SEQ ID NO: 12919 - RNA, 19 nt, artificial
  Oligomer
acaaggaggagcugacaug

SEQ ID NO: 12920 - RNA, 19 nt, artificial
  Oligomer
ccaacaacugccuguccaa

SEQ ID NO: 12921 - RNA, 19 nt, artificial
  Oligomer
agaauggcuuccucuccaa

SEQ ID NO: 12922 - RNA, 19 nt, artificial
  Oligomer
ccugguggucuucaugaaa

SEQ ID NO: 12923 - RNA, 19 nt, artificial
  Oligomer
ugcucaagaucccuaagga

SEQ ID NO: 12924 - RNA, 19 nt, artificial
  Oligomer
cuguccaacaaccgaggau

SEQ ID NO: 12925 - RNA, 19 nt, artificial
  Oligomer
caaccuaagcagcucacaa

SEQ ID NO: 12926 - RNA, 19 nt, artificial
  Oligomer
cucaaccuaagcagcucac

SEQ ID NO: 12927 - RNA, 19 nt, artificial
  Oligomer
agagcacagaagcaaagau

SEQ ID NO: 12928 - RNA, 19 nt, artificial
  Oligomer
acaacauagugguugaaga

SEQ ID NO: 12929 - RNA, 19 nt, artificial
  Oligomer
gaggacaacauagugguug

SEQ ID NO: 12930 - RNA, 19 nt, artificial
  Oligomer
guccugaacaaggguuuuc

SEQ ID NO: 12931 - RNA, 19 nt, artificial
  Oligomer
gguccugaacaaggguuuu

SEQ ID NO: 12932 - RNA, 19 nt, artificial
  Oligomer
gucuacaugagaaaugcca

SEQ ID NO: 12933 - RNA, 19 nt, artificial
  Oligomer
gcaccaggaaacaaagaug

SEQ ID NO: 12934 - RNA, 19 nt, artificial
  Oligomer
cagaagcugugaugcuuag

SEQ ID NO: 12935 - RNA, 19 nt, artificial
  Oligomer
gcagaagcugugaugcuua

SEQ ID NO: 12936 - RNA, 19 nt, artificial
  Oligomer
ccggaguauacaggauacc

SEQ ID NO: 12937 - RNA, 19 nt, artificial
  Oligomer
ucccggaguauacaggaua

SEQ ID NO: 12938 - RNA, 19 nt, artificial
  Oligomer
guucuacaauugcagugca

SEQ ID NO: 12939 - RNA, 19 nt, artificial
  Oligomer
ucccaauauugggagaaua

SEQ ID NO: 12940 - RNA, 19 nt, artificial
  Oligomer
cuccaggaaugaccaagaa

SEQ ID NO: 12941 - RNA, 19 nt, artificial
  Oligomer
ugcacauuuaugucaccca

SEQ ID NO: 12942 - RNA, 19 nt, artificial
  Oligomer
aggaguggcauaaauuuga

SEQ ID NO: 12943 - RNA, 19 nt, artificial
  Oligomer
ccacgcagucaaugucuac

SEQ ID NO: 12944 - RNA, 19 nt, artificial
  Oligomer
gccauuuugcacagugcug

SEQ ID NO: 12945 - RNA, 19 nt, artificial
  Oligomer
ugcgagagacuuuccucaa

SEQ ID NO: 12946 - RNA, 19 nt, artificial
  Oligomer
cccaaaagcugcagcagua

SEQ ID NO: 12947 - RNA, 19 nt, artificial
  Oligomer
gcugguuuaacaaccugag

SEQ ID NO: 12948 - RNA, 19 nt, artificial
  Oligomer
ugcgauccuucaucgagau

SEQ ID NO: 12949 - RNA, 19 nt, artificial
  Oligomer
aggacgaauucuucaccau

SEQ ID NO: 12950 - RNA, 19 nt, artificial
  Oligomer
agaggauaagucccgucua

SEQ ID NO: 12951 - RNA, 19 nt, artificial
  Oligomer
auuuguauaauugucuggg

SEQ ID NO: 12952 - RNA, 19 nt, artificial
  Oligomer
uuuguauaauugucugggu

SEQ ID NO: 12953 - RNA, 19 nt, artificial
  Oligomer
uuuuguggaagucaauuag

SEQ ID NO: 12954 - RNA, 19 nt, artificial
  Oligomer
uugucugggucaauauucu

SEQ ID NO: 12955 - RNA, 19 nt, artificial
  Oligomer
gaauugagaucgaguacug

SEQ ID NO: 12956 - RNA, 19 nt, artificial
  Oligomer
aauugagaucgaguacuga

SEQ ID NO: 12957 - RNA, 19 nt, artificial
  Oligomer
auugucugggucaauauuc

SEQ ID NO: 12958 - RNA, 19 nt, artificial
  Oligomer
aaguagauguggaaagugg

SEQ ID NO: 12959 - RNA, 19 nt, artificial
  Oligomer
augaagugaaaauccuccc

SEQ ID NO: 12960 - RNA, 19 nt, artificial
  Oligomer
agccuuccuaaauagcucc

SEQ ID NO: 12961 - RNA, 19 nt, artificial
  Oligomer
aguauauuuaguaggacca

SEQ ID NO: 12962 - RNA, 19 nt, artificial
  Oligomer
uuguggaagucaauuagag

SEQ ID NO: 12963 - RNA, 19 nt, artificial
  Oligomer
uagacauugacugcguggc

SEQ ID NO: 12964 - RNA, 19 nt, artificial
  Oligomer
ugguuuagggugguguugg

SEQ ID NO: 12965 - RNA, 19 nt, artificial
  Oligomer
aaccacuauguuguccucc

SEQ ID NO: 12966 - RNA, 19 nt, artificial
  Oligomer
aagagcccgaugaaaaagg

SEQ ID NO: 12967 - RNA, 19 nt, artificial
  Oligomer
auuguaccuuuucaccucc

SEQ ID NO: 12968 - RNA, 19 nt, artificial
  Oligomer
uacaugguaaacauuagac

SEQ ID NO: 12969 - RNA, 19 nt, artificial
  Oligomer
augguaaacauuagacggg

SEQ ID NO: 12970 - RNA, 19 nt, artificial
  Oligomer
uuguuggacaggaugaggu

SEQ ID NO: 12971 - RNA, 19 nt, artificial
  Oligomer
uuggacaggaugagguuga

SEQ ID NO: 12972 - RNA, 19 nt, artificial
  Oligomer
guguuggguucagaugucu

SEQ ID NO: 12973 - RNA, 19 nt, artificial
  Oligomer
uuuaguaggaccaaaacug

SEQ ID NO: 12974 - RNA, 19 nt, artificial
  Oligomer
ucgaguacugaauaucugg

SEQ ID NO: 12975 - RNA, 19 nt, artificial
  Oligomer
aaguugcugacacuuuggg

SEQ ID NO: 12976 - RNA, 19 nt, artificial
  Oligomer
uucucuacauucuugguca

SEQ ID NO: 12977 - RNA, 19 nt, artificial
  Oligomer
aaaauggccaggacaacag

SEQ ID NO: 12978 - RNA, 19 nt, artificial
  Oligomer
aagguuaugagguugcggc

SEQ ID NO: 12979 - RNA, 19 nt, artificial
  Oligomer
auauaagagaacaugaagg

SEQ ID NO: 12980 - RNA, 19 nt, artificial
  Oligomer
caugaagugaaaauccucc

SEQ ID NO: 12981 - RNA, 19 nt, artificial
  Oligomer
aucauggugaagaauucgu

SEQ ID NO: 12982 - RNA, 19 nt, artificial
  Oligomer
gaguacugaauaucuggca

SEQ ID NO: 12983 - RNA, 19 nt, artificial
  Oligomer
aucuuuguuuccuggugcc

SEQ ID NO: 12984 - RNA, 19 nt, artificial
  Oligomer
uauuguaccuuuucaccuc

SEQ ID NO: 12985 - RNA, 19 nt, artificial
  Oligomer
auagaugauugccgggacc

SEQ ID NO: 12986 - RNA, 19 nt, artificial
  Oligomer
uauaagagaacaugaagga

SEQ ID NO: 12987 - RNA, 19 nt, artificial
  Oligomer
guuggguucagaugucuuc

SEQ ID NO: 12988 - RNA, 19 nt, artificial
  Oligomer
uggaugaugaugggacugc

SEQ ID NO: 12989 - RNA, 19 nt, artificial
  Oligomer
uuucuuuuguagcuucuug

SEQ ID NO: 12990 - RNA, 19 nt, artificial
  Oligomer
cgaguacugaauaucuggc

SEQ ID NO: 12991 - RNA, 19 nt, artificial
  Oligomer
aagcaacgcaucgauuuug

SEQ ID NO: 12992 - RNA, 19 nt, artificial
  Oligomer
auuguagaacauagucucc

SEQ ID NO: 12993 - RNA, 19 nt, artificial
  Oligomer
gacaccucaaauuuaugcc

SEQ ID NO: 12994 - RNA, 19 nt, artificial
  Oligomer
cuccauagaugauugccgg

SEQ ID NO: 12995 - RNA, 19 nt, artificial
  Oligomer
uagauguggaaagugggca

SEQ ID NO: 12996 - RNA, 19 nt, artificial
  Oligomer
ucauucacaaagacguugg

SEQ ID NO: 12997 - RNA, 19 nt, artificial
  Oligomer
aacacgccaacacagaugg

SEQ ID NO: 12998 - RNA, 19 nt, artificial
  Oligomer
cugugguuuaggguggugu

SEQ ID NO: 12999 - RNA, 19 nt, artificial
  Oligomer
ucacagccuuccuaaauag

SEQ ID NO: 13000 - RNA, 19 nt, artificial
  Oligomer
cagccuuccuaaauagcuc

SEQ ID NO: 13001 - RNA, 19 nt, artificial
  Oligomer
cuuccuaaauagcuccuuc

SEQ ID NO: 13002 - RNA, 19 nt, artificial
  Oligomer
cuaaauagcuccuucucgc

SEQ ID NO: 13003 - RNA, 19 nt, artificial
  Oligomer
aagucaagcacagucaggg

SEQ ID NO: 13004 - RNA, 19 nt, artificial
  Oligomer
guguucucaaaccaguagc

SEQ ID NO: 13005 - RNA, 19 nt, artificial
  Oligomer
aacuggucgaggacaaugg

SEQ ID NO: 13006 - RNA, 19 nt, artificial
  Oligomer
caguaguuguugcagaccc

SEQ ID NO: 13007 - RNA, 19 nt, artificial
  Oligomer
uuucucauguagacaccag

SEQ ID NO: 13008 - RNA, 19 nt, artificial
  Oligomer
uucucauguagacaccagg

SEQ ID NO: 13009 - RNA, 19 nt, artificial
  Oligomer
aguacugaauaucuggcag

SEQ ID NO: 13010 - RNA, 19 nt, artificial
  Oligomer
uuuguggaagucaauuaga

SEQ ID NO: 13011 - RNA, 19 nt, artificial
  Oligomer
uggaagucaauuagagaug

SEQ ID NO: 13012 - RNA, 19 nt, artificial
  Oligomer
uggucuuuaucuucuuugg

SEQ ID NO: 13013 - RNA, 19 nt, artificial
  Oligomer
uuauaaucaucaugcacug

SEQ ID NO: 13014 - RNA, 19 nt, artificial
  Oligomer
uauaaucaucaugcacugc

SEQ ID NO: 13015 - RNA, 19 nt, artificial
  Oligomer
gccuucucuacauucuugg

SEQ ID NO: 13016 - RNA, 19 nt, artificial
  Oligomer
uauccagcacagccauugc

SEQ ID NO: 13017 - RNA, 19 nt, artificial
  Oligomer
cuuguacucaaagccuugg

SEQ ID NO: 13018 - RNA, 19 nt, artificial
  Oligomer
caccuccauagaugauugc

SEQ ID NO: 13019 - RNA, 19 nt, artificial
  Oligomer
ugacugagaagauguagac

SEQ ID NO: 13020 - RNA, 19 nt, artificial
  Oligomer
uagcgguugaggaaagucu

SEQ ID NO: 13021 - RNA, 19 nt, artificial
  Oligomer
aggaagguuaugagguugc

SEQ ID NO: 13022 - RNA, 19 nt, artificial
  Oligomer
cauacaugguaaacauuag

SEQ ID NO: 13023 - RNA, 19 nt, artificial
  Oligomer
agcagcuggaugaugaugg

SEQ ID NO: 13024 - RNA, 19 nt, artificial
  Oligomer
uuggguucagaugucuucu

SEQ ID NO: 13025 - RNA, 19 nt, artificial
  Oligomer
cuuugaguuucuuuuguag

SEQ ID NO: 13026 - RNA, 19 nt, artificial
  Oligomer
uuugaguuucuuuuguagc

SEQ ID NO: 13027 - RNA, 19 nt, artificial
  Oligomer
cgaauccaguaguuguugc

SEQ ID NO: 13028 - RNA, 19 nt, artificial
  Oligomer
gaauccaguaguuguugca

SEQ ID NO: 13029 - RNA, 19 nt, artificial
  Oligomer
cauuucucauguagacacc

SEQ ID NO: 13030 - RNA, 19 nt, artificial
  Oligomer
agcaacgcaucgauuuugu

SEQ ID NO: 13031 - RNA, 19 nt, artificial
  Oligomer
agucaauuagagauguggg

SEQ ID NO: 13032 - RNA, 19 nt, artificial
  Oligomer
auaaucaucaugcacugca

SEQ ID NO: 13033 - RNA, 19 nt, artificial
  Oligomer
cuaagguggauucugaugg

SEQ ID NO: 13034 - RNA, 19 nt, artificial
  Oligomer
uaguggugcaugaaguggg

SEQ ID NO: 13035 - RNA, 19 nt, artificial
  Oligomer
cugacuuguacucaaagcc

SEQ ID NO: 13036 - RNA, 19 nt, artificial
  Oligomer
cauagaugauugccgggac

SEQ ID NO: 13037 - RNA, 19 nt, artificial
  Oligomer
aagacauacaugauggcca

SEQ ID NO: 13038 - RNA, 19 nt, artificial
  Oligomer
aucauucacaaagacguug

SEQ ID NO: 13039 - RNA, 19 nt, artificial
  Oligomer
aaauggccaggacaacagc

SEQ ID NO: 13040 - RNA, 19 nt, artificial
  Oligomer
auaguaguaagcacgaucu

SEQ ID NO: 13041 - RNA, 19 nt, artificial
  Oligomer
uuuuugccaaaccucuucu

SEQ ID NO: 13042 - RNA, 19 nt, artificial
  Oligomer
aucucuaauaccauuucca

SEQ ID NO: 13043 - RNA, 19 nt, artificial
  Oligomer
aauaccauuuccaccucca

SEQ ID NO: 13044 - RNA, 19 nt, artificial
  Oligomer
cagcaugaagugaaaaucc

SEQ ID NO: 13045 - RNA, 19 nt, artificial
  Oligomer
ugaaaauccucccauguca

SEQ ID NO: 13046 - RNA, 19 nt, artificial
  Oligomer
uuggcugcuuccuucuuca

SEQ ID NO: 13047 - RNA, 19 nt, artificial
  Oligomer
cucuuugaguuucuuuugu

SEQ ID NO: 13048 - RNA, 19 nt, artificial
  Oligomer
gaagcagacucacuaaggg

SEQ ID NO: 13049 - RNA, 19 nt, artificial
  Oligomer
uccucuuaaaaucuuugcu

SEQ ID NO: 13050 - RNA, 19 nt, artificial
  Oligomer
ucgaggacaauggcacuga

SEQ ID NO: 13051 - RNA, 19 nt, artificial
  Oligomer
aauccaguaguuguugcag

SEQ ID NO: 13052 - RNA, 19 nt, artificial
  Oligomer
uaguuguugcagacccuga

SEQ ID NO: 13053 - RNA, 19 nt, artificial
  Oligomer
uuguugcagacccugagag

SEQ ID NO: 13054 - RNA, 19 nt, artificial
  Oligomer
auucuaugucuugaccugg

SEQ ID NO: 13055 - RNA, 19 nt, artificial
  Oligomer
gacaucaagaauaucaggg

SEQ ID NO: 13056 - RNA, 19 nt, artificial
  Oligomer
gaagucaauuagagaugug

SEQ ID NO: 13057 - RNA, 19 nt, artificial
  Oligomer
uuguaccuuuucaccucca

SEQ ID NO: 13058 - RNA, 19 nt, artificial
  Oligomer
gucuuuaucuucuuuggga

SEQ ID NO: 13059 - RNA, 19 nt, artificial
  Oligomer
uuguagaacauagucuccu

SEQ ID NO: 13060 - RNA, 19 nt, artificial
  Oligomer
uuguauaauugucuggguc

SEQ ID NO: 13061 - RNA, 19 nt, artificial
  Oligomer
uccauagaugauugccggg

SEQ ID NO: 13062 - RNA, 19 nt, artificial
  Oligomer
guagauguggaaagugggc

SEQ ID NO: 13063 - RNA, 19 nt, artificial
  Oligomer
uagcugccauggaugauga

SEQ ID NO: 13064 - RNA, 19 nt, artificial
  Oligomer
acauacaugauggccagga

SEQ ID NO: 13065 - RNA, 19 nt, artificial
  Oligomer
aaccaccaauagaacuucu

SEQ ID NO: 13066 - RNA, 19 nt, artificial
  Oligomer
cauucacaaagacguuggg

SEQ ID NO: 13067 - RNA, 19 nt, artificial
  Oligomer
auggugagcaagauauaag

SEQ ID NO: 13068 - RNA, 19 nt, artificial
  Oligomer
aagccauaguaguaagcac

SEQ ID NO: 13069 - RNA, 19 nt, artificial
  Oligomer
agcaugaagugaaaauccu

SEQ ID NO: 13070 - RNA, 19 nt, artificial
  Oligomer
ugaagugaaaauccuccca

SEQ ID NO: 13071 - RNA, 19 nt, artificial
  Oligomer
cucucaccuuucucucugg

SEQ ID NO: 13072 - RNA, 19 nt, artificial
  Oligomer
cucuucagaacuaaacagc

SEQ ID NO: 13073 - RNA, 19 nt, artificial
  Oligomer
uggacaggaugagguugac

SEQ ID NO: 13074 - RNA, 19 nt, artificial
  Oligomer
guagcuucuuguguucucg

SEQ ID NO: 13075 - RNA, 19 nt, artificial
  Oligomer
ugccagacaaagacauugg

SEQ ID NO: 13076 - RNA, 19 nt, artificial
  Oligomer
agggugguauuucggaugu

SEQ ID NO: 13077 - RNA, 19 nt, artificial
  Oligomer
cucuuaaaaucuuugcuuc

SEQ ID NO: 13078 - RNA, 19 nt, artificial
  Oligomer
uaaaaucuuugcuucugug

SEQ ID NO: 13079 - RNA, 19 nt, artificial
  Oligomer
acauuaggguugagaucac

SEQ ID NO: 13080 - RNA, 19 nt, artificial
  Oligomer
cuguacgggagaauuugcc

SEQ ID NO: 13081 - RNA, 19 nt, artificial
  Oligomer
uucucccgaauccaguagu

SEQ ID NO: 13082 - RNA, 19 nt, artificial
  Oligomer
auccaguaguuguugcaga

SEQ ID NO: 13083 - RNA, 19 nt, artificial
  Oligomer
aguaguuguugcagacccu

SEQ ID NO: 13084 - RNA, 19 nt, artificial
  Oligomer
aguuguugcagacccugag

SEQ ID NO: 13085 - RNA, 19 nt, artificial
  Oligomer
ucucauguagacaccaggg

SEQ ID NO: 13086 - RNA, 19 nt, artificial
  Oligomer
aaauauuuuacagcucagc

SEQ ID NO: 13087 - RNA, 19 nt, artificial
  Oligomer
uuaaagagcugaguaugga

SEQ ID NO: 13088 - RNA, 19 nt, artificial
  Oligomer
uaccaaagcaacgcaucga

SEQ ID NO: 13089 - RNA, 19 nt, artificial
  Oligomer
cacuauuguaccuuuucac

SEQ ID NO: 13090 - RNA, 19 nt, artificial
  Oligomer
acuauuguaccuuuucacc

SEQ ID NO: 13091 - RNA, 19 nt, artificial
  Oligomer
uaagguggauucugaugga

SEQ ID NO: 13092 - RNA, 19 nt, artificial
  Oligomer
auaguggugcaugaagugg

SEQ ID NO: 13093 - RNA, 19 nt, artificial
  Oligomer
ucuacauucuuggucauuc

SEQ ID NO: 13094 - RNA, 19 nt, artificial
  Oligomer
cuucuuacacagcauuugg

SEQ ID NO: 13095 - RNA, 19 nt, artificial
  Oligomer
guauccagcacagccauug

SEQ ID NO: 13096 - RNA, 19 nt, artificial
  Oligomer
ucaccuccauagaugauug

SEQ ID NO: 13097 - RNA, 19 nt, artificial
  Oligomer
accuccauagaugauugcc

SEQ ID NO: 13098 - RNA, 19 nt, artificial
  Oligomer
ccuccauagaugauugccg

SEQ ID NO: 13099 - RNA, 19 nt, artificial
  Oligomer
aguagauguggaaaguggg

SEQ ID NO: 13100 - RNA, 19 nt, artificial
  Oligomer
ucucgcaggaagguuauga

SEQ ID NO: 13101 - RNA, 19 nt, artificial
  Oligomer
aaaauccucccaugucagc

SEQ ID NO: 13102 - RNA, 19 nt, artificial
  Oligomer
gugaagaauucguccuugg

SEQ ID NO: 13103 - RNA, 19 nt, artificial
  Oligomer
caugguaaacauuagacgg

SEQ ID NO: 13104 - RNA, 19 nt, artificial
  Oligomer
uuccucuucagaacuaaac

SEQ ID NO: 13105 - RNA, 19 nt, artificial
  Oligomer
uucagaacuaaacagcagc

SEQ ID NO: 13106 - RNA, 19 nt, artificial
  Oligomer
uuagggaucuugagcagca

SEQ ID NO: 13107 - RNA, 19 nt, artificial
  Oligomer
augucuucuuuccucuuaa

SEQ ID NO: 13108 - RNA, 19 nt, artificial
  Oligomer
gacaaagacauugggcugc

SEQ ID NO: 13109 - RNA, 19 nt, artificial
  Oligomer
cuuaaaaucuuugcuucug

SEQ ID NO: 13110 - RNA, 19 nt, artificial
  Oligomer
aaagagcugaguauggagg

SEQ ID NO: 13111 - RNA, 19 nt, artificial
  Oligomer
aagagcugaguauggaggg

SEQ ID NO: 13112 - RNA, 19 nt, artificial
  Oligomer
aucgaguacugaauaucug

SEQ ID NO: 13113 - RNA, 19 nt, artificial
  Oligomer
aucaagaauaucagggcug

SEQ ID NO: 13114 - RNA, 19 nt, artificial
  Oligomer
ucaagaauaucagggcugg

SEQ ID NO: 13115 - RNA, 19 nt, artificial
  Oligomer
uuuguuuccuggugcccuc

SEQ ID NO: 13116 - RNA, 19 nt, artificial
  Oligomer
auaccaaagcaacgcaucg

SEQ ID NO: 13117 - RNA, 19 nt, artificial
  Oligomer
uaccuuuucaccuccacac

SEQ ID NO: 13118 - RNA, 19 nt, artificial
  Oligomer
guggucuuuaucuucuuug

SEQ ID NO: 13119 - RNA, 19 nt, artificial
  Oligomer
ggacuuauaaucaucaugc

SEQ ID NO: 13120 - RNA, 19 nt, artificial
  Oligomer
aaguucucauaguggugca

SEQ ID NO: 13121 - RNA, 19 nt, artificial
  Oligomer
acaccucaaauuuaugcca

SEQ ID NO: 13122 - RNA, 19 nt, artificial
  Oligomer
auguucugguagguggcga

SEQ ID NO: 13123 - RNA, 19 nt, artificial
  Oligomer
cucaaauuuaugccacucc

SEQ ID NO: 13124 - RNA, 19 nt, artificial
  Oligomer
agauguggaaagugggcag

SEQ ID NO: 13125 - RNA, 19 nt, artificial
  Oligomer
augaugagcagggcauaga

SEQ ID NO: 13126 - RNA, 19 nt, artificial
  Oligomer
uagagcaggauguagaggu

SEQ ID NO: 13127 - RNA, 19 nt, artificial
  Oligomer
gcgaagacauacaugaugg

SEQ ID NO: 13128 - RNA, 19 nt, artificial
  Oligomer
gaagacauacaugauggcc

SEQ ID NO: 13129 - RNA, 19 nt, artificial
  Oligomer
agacauacaugauggccag

SEQ ID NO: 13130 - RNA, 19 nt, artificial
  Oligomer
cauacaugauggccaggac

SEQ ID NO: 13131 - RNA, 19 nt, artificial
  Oligomer
auacaugauggccaggacc

SEQ ID NO: 13132 - RNA, 19 nt, artificial
  Oligomer
gaaccaccaauagaacuuc

SEQ ID NO: 13133 - RNA, 19 nt, artificial
  Oligomer
aaagucucucgcaggaagg

SEQ ID NO: 13134 - RNA, 19 nt, artificial
  Oligomer
cucgcaggaagguuaugag

SEQ ID NO: 13135 - RNA, 19 nt, artificial
  Oligomer
ggaagguuaugagguugcg

SEQ ID NO: 13136 - RNA, 19 nt, artificial
  Oligomer
gaagguuaugagguugcgg

SEQ ID NO: 13137 - RNA, 19 nt, artificial
  Oligomer
auaagagaacaugaaggag

SEQ ID NO: 13138 - RNA, 19 nt, artificial
  Oligomer
caaagccauaguaguaagc

SEQ ID NO: 13139 - RNA, 19 nt, artificial
  Oligomer
aaagccauaguaguaagca

SEQ ID NO: 13140 - RNA, 19 nt, artificial
  Oligomer
agccauaguaguaagcacg

SEQ ID NO: 13141 - RNA, 19 nt, artificial
  Oligomer
cuuuuugccaaaccucuuc

SEQ ID NO: 13142 - RNA, 19 nt, artificial
  Oligomer
ucuaauaccauuuccaccu

SEQ ID NO: 13143 - RNA, 19 nt, artificial
  Oligomer
cuaauaccauuuccaccuc

SEQ ID NO: 13144 - RNA, 19 nt, artificial
  Oligomer
auucucauccaggucauac

SEQ ID NO: 13145 - RNA, 19 nt, artificial
  Oligomer
ugguaaacauuagacggga

SEQ ID NO: 13146 - RNA, 19 nt, artificial
  Oligomer
uugccauccuugucagcca

SEQ ID NO: 13147 - RNA, 19 nt, artificial
  Oligomer
uuuuguagcuucuuguguu

SEQ ID NO: 13148 - RNA, 19 nt, artificial
  Oligomer
uuguagcuucuuguguucu

SEQ ID NO: 13149 - RNA, 19 nt, artificial
  Oligomer
agcuucuuguguucucggc

SEQ ID NO: 13150 - RNA, 19 nt, artificial
  Oligomer
uauuucggaugucuucaau

SEQ ID NO: 13151 - RNA, 19 nt, artificial
  Oligomer
gacaauggcacugaacagg

SEQ ID NO: 13152 - RNA, 19 nt, artificial
  Oligomer
uucaaccacuauguugucc

SEQ ID NO: 13153 - RNA, 19 nt, artificial
  Oligomer
ucugugcucuacuucuugc

SEQ ID NO: 13154 - RNA, 19 nt, artificial
  Oligomer
cugugcucuacuucuugcc

SEQ ID NO: 13155 - RNA, 19 nt, artificial
  Oligomer
uggguacuguucagauugg

SEQ ID NO: 13156 - RNA, 19 nt, artificial
  Oligomer
cuugggagcuuugaaaacc

SEQ ID NO: 13157 - RNA, 19 nt, artificial
  Oligomer
gagcuuugaaaacccuugu

SEQ ID NO: 13158 - RNA, 19 nt, artificial
  Oligomer
aaugacagcuggcauuucu

SEQ ID NO: 13159 - RNA, 19 nt, artificial
  Oligomer
auuucucauguagacacca

SEQ ID NO: 13160 - RNA, 19 nt, artificial
  Oligomer
aaacauucuaugucuugac

SEQ ID NO: 13161 - RNA, 19 nt, artificial
  Oligomer
aacauucuaugucuugacc

SEQ ID NO: 13162 - RNA, 19 nt, artificial
  Oligomer
guuaaagagcugaguaugg

SEQ ID NO: 13163 - RNA, 19 nt, artificial
  Oligomer
cuucuugccuucacccuca

SEQ ID NO: 13164 - RNA, 19 nt, artificial
  Oligomer
ucuuuguuuccuggugccc

SEQ ID NO: 13165 - RNA, 19 nt, artificial
  Oligomer
uucuugccuucacccucac

SEQ ID NO: 13166 - RNA, 19 nt, artificial
  Oligomer
cucccucaaaugucagucc

SEQ ID NO: 13167 - RNA, 19 nt, artificial
  Oligomer
cuuuucaccuccacacuug

SEQ ID NO: 13168 - RNA, 19 nt, artificial
  Oligomer
uuucaccuccacacuuguc

SEQ ID NO: 13169 - RNA, 19 nt, artificial
  Oligomer
auagucuccugccuuuucu

SEQ ID NO: 13170 - RNA, 19 nt, artificial
  Oligomer
aagguggauucugauggag

SEQ ID NO: 13171 - RNA, 19 nt, artificial
  Oligomer
agcugggugacauaaaugu

SEQ ID NO: 13172 - RNA, 19 nt, artificial
  Oligomer
aaggaugacuugaagacca

SEQ ID NO: 13173 - RNA, 19 nt, artificial
  Oligomer
uucacccucacucuuccag

SEQ ID NO: 13174 - RNA, 19 nt, artificial
  Oligomer
uugucaccuccauagauga

SEQ ID NO: 13175 - RNA, 19 nt, artificial
  Oligomer
auguagaggugguggguca

SEQ ID NO: 13176 - RNA, 19 nt, artificial
  Oligomer
cacgucggaaagaacaugg

SEQ ID NO: 13177 - RNA, 19 nt, artificial
  Oligomer
aaaaggcacauagcgguug

SEQ ID NO: 13178 - RNA, 19 nt, artificial
  Oligomer
auagcgguugaggaaaguc

SEQ ID NO: 13179 - RNA, 19 nt, artificial
  Oligomer
caggaagguuaugagguug

SEQ ID NO: 13180 - RNA, 19 nt, artificial
  Oligomer
uaagagaacaugaaggaga

SEQ ID NO: 13181 - RNA, 19 nt, artificial
  Oligomer
aagagaacaugaaggagac

SEQ ID NO: 13182 - RNA, 19 nt, artificial
  Oligomer
aacaugaaggagacgcugg

SEQ ID NO: 13183 - RNA, 19 nt, artificial
  Oligomer
aagugaaaauccucccaug

SEQ ID NO: 13184 - RNA, 19 nt, artificial
  Oligomer
aaauccucccaugucagcu

SEQ ID NO: 13185 - RNA, 19 nt, artificial
  Oligomer
uuaaaccagccgucauagc

SEQ ID NO: 13186 - RNA, 19 nt, artificial
  Oligomer
agcuggaugaugaugggac

SEQ ID NO: 13187 - RNA, 19 nt, artificial
  Oligomer
ucucuuugaguuucuuuug

SEQ ID NO: 13188 - RNA, 19 nt, artificial
  Oligomer
cuuuuguagcuucuugugu

SEQ ID NO: 13189 - RNA, 19 nt, artificial
  Oligomer
uguagcuucuuguguucuc

SEQ ID NO: 13190 - RNA, 19 nt, artificial
  Oligomer
uagcuucuuguguucucgg

SEQ ID NO: 13191 - RNA, 19 nt, artificial
  Oligomer
aaagaagucaagcacaguc

SEQ ID NO: 13192 - RNA, 19 nt, artificial
  Oligomer
augccagacaaagacauug

SEQ ID NO: 13193 - RNA, 19 nt, artificial
  Oligomer
acaauggcacugaacaggg

SEQ ID NO: 13194 - RNA, 19 nt, artificial
  Oligomer
uuacagcucagcuuuuuag

SEQ ID NO: 13195 - RNA, 19 nt, artificial
  Oligomer
gaccacuccaguagaugca

SEQ ID NO: 13196 - RNA, 19 nt, artificial
  Oligomer
uccaguagaugcagagagg

SEQ ID NO: 13197 - RNA, 19 nt, artificial
  Oligomer
caaauaccaaagcaacgca

SEQ ID NO: 13198 - RNA, 19 nt, artificial
  Oligomer
uguaccuuuucaccuccac

SEQ ID NO: 13199 - RNA, 19 nt, artificial
  Oligomer
uuuucaccuccacacuugu

SEQ ID NO: 13200 - RNA, 19 nt, artificial
  Oligomer
gacuuauaaucaucaugca

SEQ ID NO: 13201 - RNA, 19 nt, artificial
  Oligomer
cuuauaaucaucaugcacu

SEQ ID NO: 13202 - RNA, 19 nt, artificial
  Oligomer
uccugccuuuucucauuug

SEQ ID NO: 13203 - RNA, 19 nt, artificial
  Oligomer
gugcacagaagagaaggca

SEQ ID NO: 13204 - RNA, 19 nt, artificial
  Oligomer
ucagaaguucucauagugg

SEQ ID NO: 13205 - RNA, 19 nt, artificial
  Oligomer
caggccuucucuacauucu

SEQ ID NO: 13206 - RNA, 19 nt, artificial
  Oligomer
cacucauacacagcgaugu

SEQ ID NO: 13207 - RNA, 19 nt, artificial
  Oligomer
caccucaaauuuaugccac

SEQ ID NO: 13208 - RNA, 19 nt, artificial
  Oligomer
aauugcagguaggucacuc

SEQ ID NO: 13209 - RNA, 19 nt, artificial
  Oligomer
auagagcaggauguagagg

SEQ ID NO: 13210 - RNA, 19 nt, artificial
  Oligomer
cgaagacauacaugauggc

SEQ ID NO: 13211 - RNA, 19 nt, artificial
  Oligomer
aagcacaccugucauaccu

SEQ ID NO: 13212 - RNA, 19 nt, artificial
  Oligomer
accaccaauagaacuucug

SEQ ID NO: 13213 - RNA, 19 nt, artificial
  Oligomer
uggugagcaagauauaaga

SEQ ID NO: 13214 - RNA, 19 nt, artificial
  Oligomer
uaguaguaagcacgaucug

SEQ ID NO: 13215 - RNA, 19 nt, artificial
  Oligomer
agauggccgagaagauugc

SEQ ID NO: 13216 - RNA, 19 nt, artificial
  Oligomer
aucuucucuugcagcgccu

SEQ ID NO: 13217 - RNA, 19 nt, artificial
  Oligomer
acucucaccuuucucucug

SEQ ID NO: 13218 - RNA, 19 nt, artificial
  Oligomer
uugucagccagagagaaca

SEQ ID NO: 13219 - RNA, 19 nt, artificial
  Oligomer
auggacuccacaaacaugu

SEQ ID NO: 13220 - RNA, 19 nt, artificial
  Oligomer
cuucagaacuaaacagcag

SEQ ID NO: 13221 - RNA, 19 nt, artificial
  Oligomer
ugcucuacuucuugccuuc

SEQ ID NO: 13222 - RNA, 19 nt, artificial
  Oligomer
uacuucuugccuucacccu

SEQ ID NO: 13223 - RNA, 19 nt, artificial
  Oligomer
aucagugguugcuucuagg

SEQ ID NO: 13224 - RNA, 19 nt, artificial
  Oligomer
auauuuuacagcucagcuu

SEQ ID NO: 13225 - RNA, 19 nt, artificial
  Oligomer
gugacaucaagaauaucag

SEQ ID NO: 13226 - RNA, 19 nt, artificial
  Oligomer
caucaagaauaucagggcu

SEQ ID NO: 13227 - RNA, 19 nt, artificial
  Oligomer
cagguucuaagcaucacag

SEQ ID NO: 13228 - RNA, 19 nt, artificial
  Oligomer
aaauaccaaagcaacgcau

SEQ ID NO: 13229 - RNA, 19 nt, artificial
  Oligomer
uguagaacauagucuccug

SEQ ID NO: 13230 - RNA, 19 nt, artificial
  Oligomer
agccacucauacacagcga

SEQ ID NO: 13231 - RNA, 19 nt, artificial
  Oligomer
gaggcgaagacauacauga

SEQ ID NO: 13232 - RNA, 19 nt, artificial
  Oligomer
aagauguagacauugacug

SEQ ID NO: 13233 - RNA, 19 nt, artificial
  Oligomer
agagccugauacacaccgu

SEQ ID NO: 13234 - RNA, 19 nt, artificial
  Oligomer
uucuccacgaagcgcuugu

SEQ ID NO: 13235 - RNA, 19 nt, artificial
  Oligomer
cucgcugcaucuucucuug

SEQ ID NO: 13236 - RNA, 19 nt, artificial
  Oligomer
caaaccucuucuucagucc

SEQ ID NO: 13237 - RNA, 19 nt, artificial
  Oligomer
cuaaacagcagcaccaggu

SEQ ID NO: 13238 - RNA, 19 nt, artificial
  Oligomer
aaacagcagcaccagguca

SEQ ID NO: 13239 - RNA, 19 nt, artificial
  Oligomer
cagagagcaaugaugguga

SEQ ID NO: 13240 - RNA, 19 nt, artificial
  Oligomer
gagcaaugauggugauggc

SEQ ID NO: 13241 - RNA, 19 nt, artificial
  Oligomer
cuuuaugccagacaaagac

SEQ ID NO: 13242 - RNA, 19 nt, artificial
  Oligomer
cagacaaagacauugggcu

SEQ ID NO: 13243 - RNA, 19 nt, artificial
  Oligomer
ucuguacgggagaauuugc

SEQ ID NO: 13244 - RNA, 19 nt, artificial
  Oligomer
uucugugcucuacuucuug

SEQ ID NO: 13245 - RNA, 19 nt, artificial
  Oligomer
cauucuaugucuugaccug

SEQ ID NO: 13246 - RNA, 19 nt, artificial
  Oligomer
aauauuuuacagcucagcu

SEQ ID NO: 13247 - RNA, 19 nt, artificial
  Oligomer
uacagcucagcuuuuuagg

SEQ ID NO: 13248 - RNA, 19 nt, artificial
  Oligomer
uaaagagcugaguauggag

SEQ ID NO: 13249 - RNA, 19 nt, artificial
  Oligomer
ucaaaugucaguccaagca

SEQ ID NO: 13250 - RNA, 19 nt, artificial
  Oligomer
uccaagcaaauaccaaagc

SEQ ID NO: 13251 - RNA, 19 nt, artificial
  Oligomer
aagcacuauuguaccuuuu

SEQ ID NO: 13252 - RNA, 19 nt, artificial
  Oligomer
cagaaguucucauaguggu

SEQ ID NO: 13253 - RNA, 19 nt, artificial
  Oligomer
ugcagggaguugaagaagg

SEQ ID NO: 13254 - RNA, 19 nt, artificial
  Oligomer
aggaugacuugaagaccag

SEQ ID NO: 13255 - RNA, 19 nt, artificial
  Oligomer
uggaauugcagguagguca

SEQ ID NO: 13256 - RNA, 19 nt, artificial
  Oligomer
gugagcaagauauaagaga

SEQ ID NO: 13257 - RNA, 19 nt, artificial
  Oligomer
aagauugccacacacacga

SEQ ID NO: 13258 - RNA, 19 nt, artificial
  Oligomer
uuuugccaaaccucuucuu

SEQ ID NO: 13259 - RNA, 19 nt, artificial
  Oligomer
uuugccaaaccucuucuuc

SEQ ID NO: 13260 - RNA, 19 nt, artificial
  Oligomer
accuccaccuuugacacag

SEQ ID NO: 13261 - RNA, 19 nt, artificial
  Oligomer
cuuucaugaagaccaccag

SEQ ID NO: 13262 - RNA, 19 nt, artificial
  Oligomer
aacuaaacagcagcaccag

SEQ ID NO: 13263 - RNA, 19 nt, artificial
  Oligomer
augauggugauggcaaaac

SEQ ID NO: 13264 - RNA, 19 nt, artificial
  Oligomer
acaaagacauugggcugca

SEQ ID NO: 13265 - RNA, 19 nt, artificial
  Oligomer
uccuccaacuccgaaaucu

SEQ ID NO: 13266 - RNA, 19 nt, artificial
  Oligomer
ggguacuguucagauuggg

SEQ ID NO: 13267 - RNA, 19 nt, artificial
  Oligomer
caucagugguugcuucuag

SEQ ID NO: 13268 - RNA, 19 nt, artificial
  Oligomer
gaaacauucuaugucuuga

SEQ ID NO: 13269 - RNA, 19 nt, artificial
  Oligomer
uccagguucuaagcaucac

SEQ ID NO: 13270 - RNA, 19 nt, artificial
  Oligomer
cucagaaguucucauagug

SEQ ID NO: 13271 - RNA, 19 nt, artificial
  Oligomer
cagcuugucaccuccauag

SEQ ID NO: 13272 - RNA, 19 nt, artificial
  Oligomer
agagcaggauguagaggug

SEQ ID NO: 13273 - RNA, 19 nt, artificial
  Oligomer
acgucggaaagaacauggu

SEQ ID NO: 13274 - RNA, 19 nt, artificial
  Oligomer
ugcacucucaccuuucucu

SEQ ID NO: 13275 - RNA, 19 nt, artificial
  Oligomer
auugccacacacacgaugu

SEQ ID NO: 13276 - RNA, 19 nt, artificial
  Oligomer
acucccggaacauagacuc

SEQ ID NO: 13277 - RNA, 19 nt, artificial
  Oligomer
agccuuucaugaagaccac

SEQ ID NO: 13278 - RNA, 19 nt, artificial
  Oligomer
aacauggacuccacaaaca

SEQ ID NO: 13279 - RNA, 19 nt, artificial
  Oligomer
cugagcaaaaaggugucug

SEQ ID NO: 13280 - RNA, 19 nt, artificial
  Oligomer
ugagcaaaaaggugucuga

SEQ ID NO: 13281 - RNA, 19 nt, artificial
  Oligomer
agacucacuaagggaaggc

SEQ ID NO: 13282 - RNA, 19 nt, artificial
  Oligomer
ucaaagaagucaagcacag

SEQ ID NO: 13283 - RNA, 19 nt, artificial
  Oligomer
cacauagucuguacgggag

SEQ ID NO: 13284 - RNA, 19 nt, artificial
  Oligomer
cuccaacuccgaaaucugg

SEQ ID NO: 13285 - RNA, 19 nt, artificial
  Oligomer
augacagcuggcauuucuc

SEQ ID NO: 13286 - RNA, 19 nt, artificial
  Oligomer
uuuuacagcucagcuuuuu

SEQ ID NO: 13287 - RNA, 19 nt, artificial
  Oligomer
uaucacuggugacaucaag

SEQ ID NO: 13288 - RNA, 19 nt, artificial
  Oligomer
ugacaucaagaauaucagg

SEQ ID NO: 13289 - RNA, 19 nt, artificial
  Oligomer
ucccucaaaugucagucca

SEQ ID NO: 13290 - RNA, 19 nt, artificial
  Oligomer
ugucaguccaagcaaauac

SEQ ID NO: 13291 - RNA, 19 nt, artificial
  Oligomer
uugauaaacagguggacuu

SEQ ID NO: 13292 - RNA, 19 nt, artificial
  Oligomer
uugccuucacccucacucu

SEQ ID NO: 13293 - RNA, 19 nt, artificial
  Oligomer
acagguggacuuauaauca

SEQ ID NO: 13294 - RNA, 19 nt, artificial
  Oligomer
uaggugcacagaagagaag

SEQ ID NO: 13295 - RNA, 19 nt, artificial
  Oligomer
agggaguugaagaagggcu

SEQ ID NO: 13296 - RNA, 19 nt, artificial
  Oligomer
cuccgguucagcacuuucu

SEQ ID NO: 13297 - RNA, 19 nt, artificial
  Oligomer
uugaggauggaggcaaagg

SEQ ID NO: 13298 - RNA, 19 nt, artificial
  Oligomer
uccaaacgguccaucaagg

SEQ ID NO: 13299 - RNA, 19 nt, artificial
  Oligomer
gucggaaagaacaugguag

SEQ ID NO: 13300 - RNA, 19 nt, artificial
  Oligomer
ucggaaagaacaugguagc

SEQ ID NO: 13301 - RNA, 19 nt, artificial
  Oligomer
uuggacccaucauucacaa

SEQ ID NO: 13302 - RNA, 19 nt, artificial
  Oligomer
uccagagccugauacacac

SEQ ID NO: 13303 - RNA, 19 nt, artificial
  Oligomer
augaacgagacucgacagc

SEQ ID NO: 13304 - RNA, 19 nt, artificial
  Oligomer
gagccuuucaugaagacca

SEQ ID NO: 13305 - RNA, 19 nt, artificial
  Oligomer
cuccacaaacauguccugg

SEQ ID NO: 13306 - RNA, 19 nt, artificial
  Oligomer
gaacuaaacagcagcacca

SEQ ID NO: 13307 - RNA, 19 nt, artificial
  Oligomer
aggcagcagagagcaauga

SEQ ID NO: 13308 - RNA, 19 nt, artificial
  Oligomer
uuuaugccagacaaagaca

SEQ ID NO: 13309 - RNA, 19 nt, artificial
  Oligomer
uuaugccagacaaagacau

SEQ ID NO: 13310 - RNA, 19 nt, artificial
  Oligomer
aaagacauugggcugcagg

SEQ ID NO: 13311 - RNA, 19 nt, artificial
  Oligomer
agcagcucauucaccuccu

SEQ ID NO: 13312 - RNA, 19 nt, artificial
  Oligomer
cuuccggaaaugacagcug

SEQ ID NO: 13313 - RNA, 19 nt, artificial
  Oligomer
uuuuuaggaaagagcccga

SEQ ID NO: 13314 - RNA, 19 nt, artificial
  Oligomer
gucaguccaagcaaauacc

SEQ ID NO: 13315 - RNA, 19 nt, artificial
  Oligomer
aacauagucuccugccuuu

SEQ ID NO: 13316 - RNA, 19 nt, artificial
  Oligomer
gucugggucaauauucucc

SEQ ID NO: 13317 - RNA, 19 nt, artificial
  Oligomer
uugccaaaccucuucuuca

SEQ ID NO: 13318 - RNA, 19 nt, artificial
  Oligomer
ugccaaaccucuucuucag

SEQ ID NO: 13319 - RNA, 19 nt, artificial
  Oligomer
auccagucagaagagcucc

SEQ ID NO: 13320 - RNA, 19 nt, artificial
  Oligomer
acuccacaaacauguccug

SEQ ID NO: 13321 - RNA, 19 nt, artificial
  Oligomer
agaggccaccacaaauucc

SEQ ID NO: 13322 - RNA, 19 nt, artificial
  Oligomer
agaacauagucuccugccu

SEQ ID NO: 13323 - RNA, 19 nt, artificial
  Oligomer
gacaggcucagaaguucuc

SEQ ID NO: 13324 - RNA, 19 nt, artificial
  Oligomer
uucaccacgcugaucucca

SEQ ID NO: 13325 - RNA, 19 nt, artificial
  Oligomer
aggguggucugugcaaugu

SEQ ID NO: 13326 - RNA, 19 nt, artificial
  Oligomer
auuuccaccuccaccucca

SEQ ID NO: 13327 - RNA, 19 nt, artificial
  Oligomer
auguuguccuccaacuccg

SEQ ID NO: 13328 - RNA, 19 nt, artificial
  Oligomer
aacgcaucgauuuugugga

SEQ ID NO: 13329 - RNA, 19 nt, artificial
  Oligomer
ucugggucaauauucuccc

SEQ ID NO: 13330 - RNA, 19 nt, artificial
  Oligomer
cauucuuggucauuccugg

SEQ ID NO: 13331 - RNA, 19 nt, artificial
  Oligomer
guguccgagugaugaacga

SEQ ID NO: 13332 - RNA, 19 nt, artificial
  Oligomer
uaccauuuccaccuccacc

SEQ ID NO: 13333 - RNA, 19 nt, artificial
  Oligomer
aaggacagguagccauugc

SEQ ID NO: 13334 - RNA, 19 nt, artificial
  Oligomer
uucagaugucuucuuuccu

SEQ ID NO: 13335 - RNA, 19 nt, artificial
  Oligomer
aaauaggccaccacuccag

SEQ ID NO: 13336 - RNA, 19 nt, artificial
  Oligomer
cagaugucuucuuuccucu

SEQ ID NO: 13337 - RNA, 19 nt, artificial
  Oligomer
uugagaucacuccaguucc

SEQ ID NO: 13338 - RNA, 19 nt, artificial
  Oligomer
uauguuguccuccaacucc

SEQ ID NO: 13339 - RNA, 19 nt, artificial
  Oligomer
aucacagcuucugcacugg

SEQ ID NO: 13340 - RNA, 19 nt, artificial
  Oligomer
uuugggagauccugacugg

SEQ ID NO: 13341 - RNA, 19 nt, artificial
  Oligomer
cugggugacauaaaugugc

SEQ ID NO: 13342 - RNA, 19 nt, artificial
  Oligomer
uacacagcauuuggcugcc

SEQ ID NO: 13343 - RNA, 19 nt, artificial
  Oligomer
acuguccugacuuguacuc

SEQ ID NO: 13344 - RNA, 19 nt, artificial
  Oligomer
uuguacucaaagccuuggg

SEQ ID NO: 13345 - RNA, 19 nt, artificial
  Oligomer
gauguagacauugacugcg

SEQ ID NO: 13346 - RNA, 19 nt, artificial
  Oligomer
auguagacauugacugcgu

SEQ ID NO: 13347 - RNA, 19 nt, artificial
  Oligomer
accauuuccaccuccaccu

SEQ ID NO: 13348 - RNA, 19 nt, artificial
  Oligomer
gacucacuaagggaaggca

SEQ ID NO: 13349 - RNA, 19 nt, artificial
  Oligomer
uuaguaggaccaaaacugg

SEQ ID NO: 13350 - RNA, 19 nt, artificial
  Oligomer
uuuuaggaaagagcccgau

SEQ ID NO: 13351 - RNA, 19 nt, artificial
  Oligomer
uacugaauaucuggcagag

SEQ ID NO: 13352 - RNA, 19 nt, artificial
  Oligomer
aaguagggcugcuccuuuu

SEQ ID NO: 13353 - RNA, 19 nt, artificial
  Oligomer
acgguauccuguauacucc

SEQ ID NO: 13354 - RNA, 19 nt, artificial
  Oligomer
agauguagacauugacugc

SEQ ID NO: 13355 - RNA, 19 nt, artificial
  Oligomer
accuuugacacagagcugc

SEQ ID NO: 13356 - RNA, 19 nt, artificial
  Oligomer
aaaaaggugucugaagaag

SEQ ID NO: 13357 - RNA, 19 nt, artificial
  Oligomer
uagggaucuugagcagcag

SEQ ID NO: 13358 - RNA, 19 nt, artificial
  Oligomer
aauguugauaacagcgacc

SEQ ID NO: 13359 - RNA, 19 nt, artificial
  Oligomer
uuguucaggaccuuccgga

SEQ ID NO: 13360 - RNA, 19 nt, artificial
  Oligomer
ucuacuucuugccuucacc

SEQ ID NO: 13361 - RNA, 19 nt, artificial
  Oligomer
aggaccaaaacuggauuug

SEQ ID NO: 13362 - RNA, 19 nt, artificial
  Oligomer
uuugguagaaaucacauca

SEQ ID NO: 13363 - RNA, 19 nt, artificial
  Oligomer
guggugguaaaacauguac

SEQ ID NO: 13364 - RNA, 19 nt, artificial
  Oligomer
agaaaaguuaaagagcuga

SEQ ID NO: 13365 - RNA, 19 nt, artificial
  Oligomer
uaucuucuuugggagaucc

SEQ ID NO: 13366 - RNA, 19 nt, artificial
  Oligomer
guauccuguauacuccggg

SEQ ID NO: 13367 - RNA, 19 nt, artificial
  Oligomer
ucaucaugcacugcaauug

SEQ ID NO: 13368 - RNA, 19 nt, artificial
  Oligomer
aucaugcacugcaauugua

SEQ ID NO: 13369 - RNA, 19 nt, artificial
  Oligomer
augcacugcaauuguagaa

SEQ ID NO: 13370 - RNA, 19 nt, artificial
  Oligomer
uacuccgggaguguuuucu

SEQ ID NO: 13371 - RNA, 19 nt, artificial
  Oligomer
uacacagcgauguucuggu

SEQ ID NO: 13372 - RNA, 19 nt, artificial
  Oligomer
aucaaaaggcacauagcgg

SEQ ID NO: 13373 - RNA, 19 nt, artificial
  Oligomer
guacugcugcagcuuuugg

SEQ ID NO: 13374 - RNA, 19 nt, artificial
  Oligomer
gauccagucagaagagcuc

SEQ ID NO: 13375 - RNA, 19 nt, artificial
  Oligomer
uugauguccagcaccugag

SEQ ID NO: 13376 - RNA, 19 nt, artificial
  Oligomer
aauagcuccuucucgcuca

SEQ ID NO: 13377 - RNA, 19 nt, artificial
  Oligomer
agagcaaugauggugaugg

SEQ ID NO: 13378 - RNA, 19 nt, artificial
  Oligomer
auaacagcgaccagcacgu

SEQ ID NO: 13379 - RNA, 19 nt, artificial
  Oligomer
uguucucaaaccaguagcg

SEQ ID NO: 13380 - RNA, 19 nt, artificial
  Oligomer
ucaaccacuauguuguccu

SEQ ID NO: 13381 - RNA, 19 nt, artificial
  Oligomer
cucuacuucuugccuucac

SEQ ID NO: 13382 - RNA, 19 nt, artificial
  Oligomer
aaacccuuguucaggaccu

SEQ ID NO: 13383 - RNA, 19 nt, artificial
  Oligomer
uaggaccaaaacuggauuu

SEQ ID NO: 13384 - RNA, 19 nt, artificial
  Oligomer
cuuuuuaggaaagagcccg

SEQ ID NO: 13385 - RNA, 19 nt, artificial
  Oligomer
cuuugggagauccugacug

SEQ ID NO: 13386 - RNA, 19 nt, artificial
  Oligomer
aauauucucccaauauugg

SEQ ID NO: 13387 - RNA, 19 nt, artificial
  Oligomer
auauucucccaauauuggg

SEQ ID NO: 13388 - RNA, 19 nt, artificial
  Oligomer
aaggcaggauacuggaagc

SEQ ID NO: 13389 - RNA, 19 nt, artificial
  Oligomer
cagauguauagcauggugg

SEQ ID NO: 13390 - RNA, 19 nt, artificial
  Oligomer
uuacacagcauuuggcugc

SEQ ID NO: 13391 - RNA, 19 nt, artificial
  Oligomer
aaaggcacauagcgguuga

SEQ ID NO: 13392 - RNA, 19 nt, artificial
  Oligomer
gagaacaugaaggagacgc

SEQ ID NO: 13393 - RNA, 19 nt, artificial
  Oligomer
aaccucuucuucaguccag

SEQ ID NO: 13394 - RNA, 19 nt, artificial
  Oligomer
aacauagacuccaccaccu

SEQ ID NO: 13395 - RNA, 19 nt, artificial
  Oligomer
gaggaagccauucucaucc

SEQ ID NO: 13396 - RNA, 19 nt, artificial
  Oligomer
auccaggucauacauggua

SEQ ID NO: 13397 - RNA, 19 nt, artificial
  Oligomer
augagguugaccugcugca

SEQ ID NO: 13398 - RNA, 19 nt, artificial
  Oligomer
uugaguuucuuuuguagcu

SEQ ID NO: 13399 - RNA, 19 nt, artificial
  Oligomer
uccagagagaagcagacuc

SEQ ID NO: 13400 - RNA, 19 nt, artificial
  Oligomer
ugagcugcuuagguugagg

SEQ ID NO: 13401 - RNA, 19 nt, artificial
  Oligomer
uuccugguguucucaaacc

SEQ ID NO: 13402 - RNA, 19 nt, artificial
  Oligomer
uacgggagaauuugccagg

SEQ ID NO: 13403 - RNA, 19 nt, artificial
  Oligomer
uugggagcuuugaaaaccc

SEQ ID NO: 13404 - RNA, 19 nt, artificial
  Oligomer
auuugguagaaaucacauc

SEQ ID NO: 13405 - RNA, 19 nt, artificial
  Oligomer
uucuaugucuugaccuggg

SEQ ID NO: 13406 - RNA, 19 nt, artificial
  Oligomer
aagaaaaguuaaagagcug

SEQ ID NO: 13407 - RNA, 19 nt, artificial
  Oligomer
gaaaaguuaaagagcugag

SEQ ID NO: 13408 - RNA, 19 nt, artificial
  Oligomer
aaaaguuaaagagcugagu

SEQ ID NO: 13409 - RNA, 19 nt, artificial
  Oligomer
uucuaagcaucacagcuuc

SEQ ID NO: 13410 - RNA, 19 nt, artificial
  Oligomer
uuuucugcaggaagcuggg

SEQ ID NO: 13411 - RNA, 19 nt, artificial
  Oligomer
auagcauggugguccugag

SEQ ID NO: 13412 - RNA, 19 nt, artificial
  Oligomer
uaaaugugcacagacacca

SEQ ID NO: 13413 - RNA, 19 nt, artificial
  Oligomer
auacacagcgauguucugg

SEQ ID NO: 13414 - RNA, 19 nt, artificial
  Oligomer
aaauuuaugccacuccuga

SEQ ID NO: 13415 - RNA, 19 nt, artificial
  Oligomer
gaccaggaaguagaugugg

SEQ ID NO: 13416 - RNA, 19 nt, artificial
  Oligomer
uggaucagagcauagcugc

SEQ ID NO: 13417 - RNA, 19 nt, artificial
  Oligomer
ucaaaaggcacauagcggu

SEQ ID NO: 13418 - RNA, 19 nt, artificial
  Oligomer
uuuugggcuaggaagccuc

SEQ ID NO: 13419 - RNA, 19 nt, artificial
  Oligomer
caugucagcuccuccuugu

SEQ ID NO: 13420 - RNA, 19 nt, artificial
  Oligomer
uuggacaggcaguuguugg

SEQ ID NO: 13421 - RNA, 19 nt, artificial
  Oligomer
uuggagaggaagccauucu

SEQ ID NO: 13422 - RNA, 19 nt, artificial
  Oligomer
uuucaugaagaccaccagg

SEQ ID NO: 13423 - RNA, 19 nt, artificial
  Oligomer
uccuuagggaucuugagca

SEQ ID NO: 13424 - RNA, 19 nt, artificial
  Oligomer
auccucgguuguuggacag

SEQ ID NO: 13425 - RNA, 19 nt, artificial
  Oligomer
uugugagcugcuuagguug

SEQ ID NO: 13426 - RNA, 19 nt, artificial
  Oligomer
gugagcugcuuagguugag

SEQ ID NO: 13427 - RNA, 19 nt, artificial
  Oligomer
aucuuugcuucugugcucu

SEQ ID NO: 13428 - RNA, 19 nt, artificial
  Oligomer
ucuucaaccacuauguugu

SEQ ID NO: 13429 - RNA, 19 nt, artificial
  Oligomer
caaccacuauguuguccuc

SEQ ID NO: 13430 - RNA, 19 nt, artificial
  Oligomer
gaaaacccuuguucaggac

SEQ ID NO: 13431 - RNA, 19 nt, artificial
  Oligomer
aaaacccuuguucaggacc

SEQ ID NO: 13432 - RNA, 19 nt, artificial
  Oligomer
uggcauuucucauguagac

SEQ ID NO: 13433 - RNA, 19 nt, artificial
  Oligomer
caucuuuguuuccuggugc

SEQ ID NO: 13434 - RNA, 19 nt, artificial
  Oligomer
cuaagcaucacagcuucug

SEQ ID NO: 13435 - RNA, 19 nt, artificial
  Oligomer
uaagcaucacagcuucugc

SEQ ID NO: 13436 - RNA, 19 nt, artificial
  Oligomer
gguauccuguauacuccgg

SEQ ID NO: 13437 - RNA, 19 nt, artificial
  Oligomer
uauccuguauacuccggga

SEQ ID NO: 13438 - RNA, 19 nt, artificial
  Oligomer
ugcacugcaauuguagaac

SEQ ID NO: 13439 - RNA, 19 nt, artificial
  Oligomer
uauucucccaauauuggga

SEQ ID NO: 13440 - RNA, 19 nt, artificial
  Oligomer
uucuuggucauuccuggag

SEQ ID NO: 13441 - RNA, 19 nt, artificial
  Oligomer
ugggugacauaaaugugca

SEQ ID NO: 13442 - RNA, 19 nt, artificial
  Oligomer
ucaaauuuaugccacuccu

SEQ ID NO: 13443 - RNA, 19 nt, artificial
  Oligomer
guagacauugacugcgugg

SEQ ID NO: 13444 - RNA, 19 nt, artificial
  Oligomer
cagcacugugcaaaauggc

SEQ ID NO: 13445 - RNA, 19 nt, artificial
  Oligomer
uugaggaaagucucucgca

SEQ ID NO: 13446 - RNA, 19 nt, artificial
  Oligomer
uacugcugcagcuuuuggg

SEQ ID NO: 13447 - RNA, 19 nt, artificial
  Oligomer
cucagguuguuaaaccagc

SEQ ID NO: 13448 - RNA, 19 nt, artificial
  Oligomer
aucucgaugaaggaucgca

SEQ ID NO: 13449 - RNA, 19 nt, artificial
  Oligomer
auggugaagaauucguccu

SEQ ID NO: 13450 - RNA, 19 nt, artificial
  Oligomer
uagacgggacuuauccucu

SEQ ID NO: 13451 - RNA, 21 nt, artificial
  Oligomer
ccagacaauuauacaaaugag

SEQ ID NO: 13452 - RNA, 21 nt, artificial
  Oligomer
ugaacccaacaccacccuaaa

SEQ ID NO: 13453 - RNA, 21 nt, artificial
  Oligomer
cccagacaauuauacaaauga

SEQ ID NO: 13454 - RNA, 21 nt, artificial
  Oligomer
gagaauauugacccagacaau

SEQ ID NO: 13455 - RNA, 21 nt, artificial
  Oligomer
ccgucuaauguuuaccaugua

SEQ ID NO: 13456 - RNA, 21 nt, artificial
  Oligomer
acccagacaauuauacaaaug

SEQ ID NO: 13457 - RNA, 21 nt, artificial
  Oligomer
ccaaaugcuguguaagaagau

SEQ ID NO: 13458 - RNA, 21 nt, artificial
  Oligomer
cgucuaauguuuaccauguau

SEQ ID NO: 13459 - RNA, 21 nt, artificial
  Oligomer
acccaacaccacccuaaacca

SEQ ID NO: 13460 - RNA, 21 nt, artificial
  Oligomer
cccuggugucuacaugagaaa

SEQ ID NO: 13461 - RNA, 21 nt, artificial
  Oligomer
ucaguacucgaucucaauucc

SEQ ID NO: 13462 - RNA, 21 nt, artificial
  Oligomer
ucucuaauugacuuccacaaa

SEQ ID NO: 13463 - RNA, 21 nt, artificial
  Oligomer
ggaaaugguauuagagauauc

SEQ ID NO: 13464 - RNA, 21 nt, artificial
  Oligomer
ggagcuauuuaggaaggcugu

SEQ ID NO: 13465 - RNA, 21 nt, artificial
  Oligomer
gcacagaagcaaagauuuuaa

SEQ ID NO: 13466 - RNA, 21 nt, artificial
  Oligomer
cucuaauugacuuccacaaaa

SEQ ID NO: 13467 - RNA, 21 nt, artificial
  Oligomer
cgagaaggagcuauuuaggaa

SEQ ID NO: 13468 - RNA, 21 nt, artificial
  Oligomer
ggucaaccucauccuguccaa

SEQ ID NO: 13469 - RNA, 21 nt, artificial
  Oligomer
acaaaaucgaugcguugcuuu

SEQ ID NO: 13470 - RNA, 21 nt, artificial
  Oligomer
gcccacuuuccacaucuacuu

SEQ ID NO: 13471 - RNA, 21 nt, artificial
  Oligomer
cccaacgucuuugugaaugau

SEQ ID NO: 13472 - RNA, 21 nt, artificial
  Oligomer
cuccuucauguucucuuauau

SEQ ID NO: 13473 - RNA, 21 nt, artificial
  Oligomer
ggagcugacaugggaggauuu

SEQ ID NO: 13474 - RNA, 21 nt, artificial
  Oligomer
ccaacaccacccuaaaccaca

SEQ ID NO: 13475 - RNA, 21 nt, artificial
  Oligomer
cuauuuaggaaggcugugaca

SEQ ID NO: 13476 - RNA, 21 nt, artificial
  Oligomer
gcuauuuaggaaggcugugac

SEQ ID NO: 13477 - RNA, 21 nt, artificial
  Oligomer
caaccucauccuguccaacaa

SEQ ID NO: 13478 - RNA, 21 nt, artificial
  Oligomer
agaagacaucugaacccaaca

SEQ ID NO: 13479 - RNA, 21 nt, artificial
  Oligomer
cgagaacacaagaagcuacaa

SEQ ID NO: 13480 - RNA, 21 nt, artificial
  Oligomer
caacuacuggauucgggagaa

SEQ ID NO: 13481 - RNA, 21 nt, artificial
  Oligomer
acaucucuaauugacuuccac

SEQ ID NO: 13482 - RNA, 21 nt, artificial
  Oligomer
cccacaucucuaauugacuuc

SEQ ID NO: 13483 - RNA, 21 nt, artificial
  Oligomer
ggaggugaaaagguacaauag

SEQ ID NO: 13484 - RNA, 21 nt, artificial
  Oligomer
ggagacuauguucuacaauug

SEQ ID NO: 13485 - RNA, 21 nt, artificial
  Oligomer
cccacuuuccacaucuacuuc

SEQ ID NO: 13486 - RNA, 21 nt, artificial
  Oligomer
cucuuauaucuugcucaccau

SEQ ID NO: 13487 - RNA, 21 nt, artificial
  Oligomer
guggaaaugguauuagagaua

SEQ ID NO: 13488 - RNA, 21 nt, artificial
  Oligomer
ggagguggaaaugguauuaga

SEQ ID NO: 13489 - RNA, 21 nt, artificial
  Oligomer
cacaagaagcuacaaaagaaa

SEQ ID NO: 13490 - RNA, 21 nt, artificial
  Oligomer
agaacacaagaagcuacaaaa

SEQ ID NO: 13491 - RNA, 21 nt, artificial
  Oligomer
gccauuguccucgaccaguuu

SEQ ID NO: 13492 - RNA, 21 nt, artificial
  Oligomer
ugccagauauucaguacucga

SEQ ID NO: 13493 - RNA, 21 nt, artificial
  Oligomer
gcagugcaugaugauuauaag

SEQ ID NO: 13494 - RNA, 21 nt, artificial
  Oligomer
ggaaugaccaagaauguagag

SEQ ID NO: 13495 - RNA, 21 nt, artificial
  Oligomer
gcuguuguccuggccauuuug

SEQ ID NO: 13496 - RNA, 21 nt, artificial
  Oligomer
ugcuguuguccuggccauuuu

SEQ ID NO: 13497 - RNA, 21 nt, artificial
  Oligomer
ccgcaaccucauaaccuuccu

SEQ ID NO: 13498 - RNA, 21 nt, artificial
  Oligomer
guggagguggaaaugguauua

SEQ ID NO: 13499 - RNA, 21 nt, artificial
  Oligomer
aaagaagacaucugaacccaa

SEQ ID NO: 13500 - RNA, 21 nt, artificial
  Oligomer
ggucugcaacaacuacuggau

SEQ ID NO: 13501 - RNA, 21 nt, artificial
  Oligomer
ccuggugucuacaugagaaau

SEQ ID NO: 13502 - RNA, 21 nt, artificial
  Oligomer
caguuuugguccuacuaaaua

SEQ ID NO: 13503 - RNA, 21 nt, artificial
  Oligomer
cccuccauacucagcucuuua

SEQ ID NO: 13504 - RNA, 21 nt, artificial
  Oligomer
cacaucucuaauugacuucca

SEQ ID NO: 13505 - RNA, 21 nt, artificial
  Oligomer
uggaggugaaaagguacaaua

SEQ ID NO: 13506 - RNA, 21 nt, artificial
  Oligomer
gugacaaguguggaggugaaa

SEQ ID NO: 13507 - RNA, 21 nt, artificial
  Oligomer
cccaaagaagauaaagaccac

SEQ ID NO: 13508 - RNA, 21 nt, artificial
  Oligomer
ugacccagacaauuauacaaa

SEQ ID NO: 13509 - RNA, 21 nt, artificial
  Oligomer
ccaagaauguagagaaggccu

SEQ ID NO: 13510 - RNA, 21 nt, artificial
  Oligomer
ggcaaucaucuauggagguga

SEQ ID NO: 13511 - RNA, 21 nt, artificial
  Oligomer
gcugcccacuuuccacaucua

SEQ ID NO: 13512 - RNA, 21 nt, artificial
  Oligomer
ccaccucuacauccugcucua

SEQ ID NO: 13513 - RNA, 21 nt, artificial
  Oligomer
ccuggccaucauguaugucuu

SEQ ID NO: 13514 - RNA, 21 nt, artificial
  Oligomer
gaagaagagguuuggcaaaaa

SEQ ID NO: 13515 - RNA, 21 nt, artificial
  Oligomer
gaaagaagacaucugaaccca

SEQ ID NO: 13516 - RNA, 21 nt, artificial
  Oligomer
agaaggaagcagccaaagaug

SEQ ID NO: 13517 - RNA, 21 nt, artificial
  Oligomer
gugaagaaggaagcagccaaa

SEQ ID NO: 13518 - RNA, 21 nt, artificial
  Oligomer
gcuacaaaagaaacucaaaga

SEQ ID NO: 13519 - RNA, 21 nt, artificial
  Oligomer
acacaagaagcuacaaaagaa

SEQ ID NO: 13520 - RNA, 21 nt, artificial
  Oligomer
ccaaugucuuugucuggcaua

SEQ ID NO: 13521 - RNA, 21 nt, artificial
  Oligomer
caacaacuacuggauucggga

SEQ ID NO: 13522 - RNA, 21 nt, artificial
  Oligomer
ucucagggucugcaacaacua

SEQ ID NO: 13523 - RNA, 21 nt, artificial
  Oligomer
gcucuuuaacuuuucuuuucc

SEQ ID NO: 13524 - RNA, 21 nt, artificial
  Oligomer
ccaaagaagauaaagaccacu

SEQ ID NO: 13525 - RNA, 21 nt, artificial
  Oligomer
gacccagacaauuauacaaau

SEQ ID NO: 13526 - RNA, 21 nt, artificial
  Oligomer
cucaucauccauggcagcuau

SEQ ID NO: 13527 - RNA, 21 nt, artificial
  Oligomer
gaaguucuauuggugguucuu

SEQ ID NO: 13528 - RNA, 21 nt, artificial
  Oligomer
ccaacgucuuugugaaugaug

SEQ ID NO: 13529 - RNA, 21 nt, artificial
  Oligomer
ggaggauuuucacuucaugcu

SEQ ID NO: 13530 - RNA, 21 nt, artificial
  Oligomer
gucuaauguuuaccauguaug

SEQ ID NO: 13531 - RNA, 21 nt, artificial
  Oligomer
aggagcuauuuaggaaggcug

SEQ ID NO: 13532 - RNA, 21 nt, artificial
  Oligomer
gagaaggagcuauuuaggaag

SEQ ID NO: 13533 - RNA, 21 nt, artificial
  Oligomer
cuacaaaagaaacucaaagag

SEQ ID NO: 13534 - RNA, 21 nt, artificial
  Oligomer
gaacacaagaagcuacaaaag

SEQ ID NO: 13535 - RNA, 21 nt, artificial
  Oligomer
gucugcaacaacuacuggauu

SEQ ID NO: 13536 - RNA, 21 nt, artificial
  Oligomer
ccaggucaagacauagaaugu

SEQ ID NO: 13537 - RNA, 21 nt, artificial
  Oligomer
ccagauauucaguacucgauc

SEQ ID NO: 13538 - RNA, 21 nt, artificial
  Oligomer
cccagcccugauauucuugau

SEQ ID NO: 13539 - RNA, 21 nt, artificial
  Oligomer
ccacaucucuaauugacuucc

SEQ ID NO: 13540 - RNA, 21 nt, artificial
  Oligomer
guggaggugaaaagguacaau

SEQ ID NO: 13541 - RNA, 21 nt, artificial
  Oligomer
ugauuauaaguccaccuguuu

SEQ ID NO: 13542 - RNA, 21 nt, artificial
  Oligomer
gcaugaugauuauaaguccac

SEQ ID NO: 13543 - RNA, 21 nt, artificial
  Oligomer
acaauugcagugcaugaugau

SEQ ID NO: 13544 - RNA, 21 nt, artificial
  Oligomer
caggagacuauguucuacaau

SEQ ID NO: 13545 - RNA, 21 nt, artificial
  Oligomer
ggcauaaauuugaggugucag

SEQ ID NO: 13546 - RNA, 21 nt, artificial
  Oligomer
gguccuggccaucauguaugu

SEQ ID NO: 13547 - RNA, 21 nt, artificial
  Oligomer
cgcaaccucauaaccuuccug

SEQ ID NO: 13548 - RNA, 21 nt, artificial
  Oligomer
uccuucauguucucuuauauc

SEQ ID NO: 13549 - RNA, 21 nt, artificial
  Oligomer
cgugcuuacuacuauggcuuu

SEQ ID NO: 13550 - RNA, 21 nt, artificial
  Oligomer
gaggauuuucacuucaugcug

SEQ ID NO: 13551 - RNA, 21 nt, artificial
  Oligomer
cccgucuaauguuuaccaugu

SEQ ID NO: 13552 - RNA, 21 nt, artificial
  Oligomer
ccgagaacacaagaagcuaca

SEQ ID NO: 13553 - RNA, 21 nt, artificial
  Oligomer
ggccgagaacacaagaagcua

SEQ ID NO: 13554 - RNA, 21 nt, artificial
  Oligomer
gaagcaaagauuuuaagagga

SEQ ID NO: 13555 - RNA, 21 nt, artificial
  Oligomer
ggcaagaaguagagcacagaa

SEQ ID NO: 13556 - RNA, 21 nt, artificial
  Oligomer
agauauucaguacucgaucuc

SEQ ID NO: 13557 - RNA, 21 nt, artificial
  Oligomer
cgaugcguugcuuugguauuu

SEQ ID NO: 13558 - RNA, 21 nt, artificial
  Oligomer
gcauaaauuugaggugucagu

SEQ ID NO: 13559 - RNA, 21 nt, artificial
  Oligomer
ggcuuugaguacaagucagga

SEQ ID NO: 13560 - RNA, 21 nt, artificial
  Oligomer
cacuuuccacaucuacuuccu

SEQ ID NO: 13561 - RNA, 21 nt, artificial
  Oligomer
gcucuaugcccugcucaucau

SEQ ID NO: 13562 - RNA, 21 nt, artificial
  Oligomer
ccaucauguaugucuucgccu

SEQ ID NO: 13563 - RNA, 21 nt, artificial
  Oligomer
ugucuacaucuucucagucag

SEQ ID NO: 13564 - RNA, 21 nt, artificial
  Oligomer
cugcuguuguccuggccauuu

SEQ ID NO: 13565 - RNA, 21 nt, artificial
  Oligomer
gucuccuucauguucucuuau

SEQ ID NO: 13566 - RNA, 21 nt, artificial
  Oligomer
ucgugcuuacuacuauggcuu

SEQ ID NO: 13567 - RNA, 21 nt, artificial
  Oligomer
ccaucuguguuggcguguuug

SEQ ID NO: 13568 - RNA, 21 nt, artificial
  Oligomer
gguggaaaugguauuagagau

SEQ ID NO: 13569 - RNA, 21 nt, artificial
  Oligomer
ccagagagaaaggugagagug

SEQ ID NO: 13570 - RNA, 21 nt, artificial
  Oligomer
gggaggauuuucacuucaugc

SEQ ID NO: 13571 - RNA, 21 nt, artificial
  Oligomer
ugggaggauuuucacuucaug

SEQ ID NO: 13572 - RNA, 21 nt, artificial
  Oligomer
cuaugacggcugguuuaacaa

SEQ ID NO: 13573 - RNA, 21 nt, artificial
  Oligomer
gucccgucuaauguuuaccau

SEQ ID NO: 13574 - RNA, 21 nt, artificial
  Oligomer
gcgagaaggagcuauuuagga

SEQ ID NO: 13575 - RNA, 21 nt, artificial
  Oligomer
gcuguuuaguucugaagagga

SEQ ID NO: 13576 - RNA, 21 nt, artificial
  Oligomer
ugaagaaggaagcagccaaag

SEQ ID NO: 13577 - RNA, 21 nt, artificial
  Oligomer
acaagaagcuacaaaagaaac

SEQ ID NO: 13578 - RNA, 21 nt, artificial
  Oligomer
cugacugugcuugacuucuuu

SEQ ID NO: 13579 - RNA, 21 nt, artificial
  Oligomer
ugaacaaggguuuucaaagcu

SEQ ID NO: 13580 - RNA, 21 nt, artificial
  Oligomer
ccuaaaaagcugagcuguaaa

SEQ ID NO: 13581 - RNA, 21 nt, artificial
  Oligomer
gcccugauauucuugauguca

SEQ ID NO: 13582 - RNA, 21 nt, artificial
  Oligomer
ggacugacauuugagggagga

SEQ ID NO: 13583 - RNA, 21 nt, artificial
  Oligomer
ugacaaguguggaggugaaaa

SEQ ID NO: 13584 - RNA, 21 nt, artificial
  Oligomer
ccuucucuucugugcaccuaa

SEQ ID NO: 13585 - RNA, 21 nt, artificial
  Oligomer
agaacaucgcuguguaugagu

SEQ ID NO: 13586 - RNA, 21 nt, artificial
  Oligomer
gccaaaugcuguguaagaaga

SEQ ID NO: 13587 - RNA, 21 nt, artificial
  Oligomer
uggcauaaauuugagguguca

SEQ ID NO: 13588 - RNA, 21 nt, artificial
  Oligomer
caaggcuuugaguacaaguca

SEQ ID NO: 13589 - RNA, 21 nt, artificial
  Oligomer
cugcccacuuuccacaucuac

SEQ ID NO: 13590 - RNA, 21 nt, artificial
  Oligomer
cucuaugcccugcucaucauc

SEQ ID NO: 13591 - RNA, 21 nt, artificial
  Oligomer
caccucuacauccugcucuau

SEQ ID NO: 13592 - RNA, 21 nt, artificial
  Oligomer
agaaguucuauuggugguucu

SEQ ID NO: 13593 - RNA, 21 nt, artificial
  Oligomer
ccuucauguucucuuauaucu

SEQ ID NO: 13594 - RNA, 21 nt, artificial
  Oligomer
gagguggaaaugguauuagag

SEQ ID NO: 13595 - RNA, 21 nt, artificial
  Oligomer
augggaggauuuucacuucau

SEQ ID NO: 13596 - RNA, 21 nt, artificial
  Oligomer
acaugggaggauuuucacuuc

SEQ ID NO: 13597 - RNA, 21 nt, artificial
  Oligomer
cugacaugggaggauuuucac

SEQ ID NO: 13598 - RNA, 21 nt, artificial
  Oligomer
auguaugaccuggaugagaau

SEQ ID NO: 13599 - RNA, 21 nt, artificial
  Oligomer
auaagucccgucuaauguuua

SEQ ID NO: 13600 - RNA, 21 nt, artificial
  Oligomer
cuguuuaguucugaagaggaa

SEQ ID NO: 13601 - RNA, 21 nt, artificial
  Oligomer
gagcagucccaucaucaucca

SEQ ID NO: 13602 - RNA, 21 nt, artificial
  Oligomer
cgugaagaaggaagcagccaa

SEQ ID NO: 13603 - RNA, 21 nt, artificial
  Oligomer
gagaacacaagaagcuacaaa

SEQ ID NO: 13604 - RNA, 21 nt, artificial
  Oligomer
agacauccgaaauaccacccu

SEQ ID NO: 13605 - RNA, 21 nt, artificial
  Oligomer
aggucaagacauagaauguuu

SEQ ID NO: 13606 - RNA, 21 nt, artificial
  Oligomer
ucaucgggcucuuuccuaaaa

SEQ ID NO: 13607 - RNA, 21 nt, artificial
  Oligomer
gcaagagccaggcugaaacau

SEQ ID NO: 13608 - RNA, 21 nt, artificial
  Oligomer
gccagauauucaguacucgau

SEQ ID NO: 13609 - RNA, 21 nt, artificial
  Oligomer
ccagcccugauauucuugaug

SEQ ID NO: 13610 - RNA, 21 nt, artificial
  Oligomer
ggugaaaagguacaauagugc

SEQ ID NO: 13611 - RNA, 21 nt, artificial
  Oligomer
caaagaagauaaagaccacuc

SEQ ID NO: 13612 - RNA, 21 nt, artificial
  Oligomer
ugcaugaugauuauaagucca

SEQ ID NO: 13613 - RNA, 21 nt, artificial
  Oligomer
cagugcaugaugauuauaagu

SEQ ID NO: 13614 - RNA, 21 nt, artificial
  Oligomer
gaauguagagaaggccuguca

SEQ ID NO: 13615 - RNA, 21 nt, artificial
  Oligomer
gcacauuuaugucacccagcu

SEQ ID NO: 13616 - RNA, 21 nt, artificial
  Oligomer
guggcauaaauuugagguguc

SEQ ID NO: 13617 - RNA, 21 nt, artificial
  Oligomer
ccaaggcuuugaguacaaguc

SEQ ID NO: 13618 - RNA, 21 nt, artificial
  Oligomer
cggcaaucaucuauggaggug

SEQ ID NO: 13619 - RNA, 21 nt, artificial
  Oligomer
ggccaucauguaugucuucgc

SEQ ID NO: 13620 - RNA, 21 nt, artificial
  Oligomer
cuggccaucauguaugucuuc

SEQ ID NO: 13621 - RNA, 21 nt, artificial
  Oligomer
ccagguaugacaggugugcuu

SEQ ID NO: 13622 - RNA, 21 nt, artificial
  Oligomer
gacuuuccucaaccgcuaugu

SEQ ID NO: 13623 - RNA, 21 nt, artificial
  Oligomer
ugccgcaaccucauaaccuuc

SEQ ID NO: 13624 - RNA, 21 nt, artificial
  Oligomer
gagcugacaugggaggauuuu

SEQ ID NO: 13625 - RNA, 21 nt, artificial
  Oligomer
aggagcugacaugggaggauu

SEQ ID NO: 13626 - RNA, 21 nt, artificial
  Oligomer
ucccgucuaauguuuaccaug

SEQ ID NO: 13627 - RNA, 21 nt, artificial
  Oligomer
ucccaucaucauccagcugcu

SEQ ID NO: 13628 - RNA, 21 nt, artificial
  Oligomer
ccugacugugcuugacuucuu

SEQ ID NO: 13629 - RNA, 21 nt, artificial
  Oligomer
cacagaagcaaagauuuuaag

SEQ ID NO: 13630 - RNA, 21 nt, artificial
  Oligomer
ugagggugaaggcaagaagua

SEQ ID NO: 13631 - RNA, 21 nt, artificial
  Oligomer
cuccauacucagcucuuuaac

SEQ ID NO: 13632 - RNA, 21 nt, artificial
  Oligomer
agggcaccaggaaacaaagau

SEQ ID NO: 13633 - RNA, 21 nt, artificial
  Oligomer
gguauuugcuuggacugacau

SEQ ID NO: 13634 - RNA, 21 nt, artificial
  Oligomer
ugaaaagguacaauagugcuu

SEQ ID NO: 13635 - RNA, 21 nt, artificial
  Oligomer
gugaaaagguacaauagugcu

SEQ ID NO: 13636 - RNA, 21 nt, artificial
  Oligomer
uguggaggugaaaagguacaa

SEQ ID NO: 13637 - RNA, 21 nt, artificial
  Oligomer
ugcagugcaugaugauuauaa

SEQ ID NO: 13638 - RNA, 21 nt, artificial
  Oligomer
aggagacuauguucuacaauu

SEQ ID NO: 13639 - RNA, 21 nt, artificial
  Oligomer
caaaugagaaaaggcaggaga

SEQ ID NO: 13640 - RNA, 21 nt, artificial
  Oligomer
acaaaugagaaaaggcaggag

SEQ ID NO: 13641 - RNA, 21 nt, artificial
  Oligomer
gccuucucuucugugcaccua

SEQ ID NO: 13642 - RNA, 21 nt, artificial
  Oligomer
cacauuuaugucacccagcug

SEQ ID NO: 13643 - RNA, 21 nt, artificial
  Oligomer
cccuuugccuccauccucaaa

SEQ ID NO: 13644 - RNA, 21 nt, artificial
  Oligomer
ggaguggcauaaauuugaggu

SEQ ID NO: 13645 - RNA, 21 nt, artificial
  Oligomer
agcugcccacuuuccacaucu

SEQ ID NO: 13646 - RNA, 21 nt, artificial
  Oligomer
gugccgcaaccucauaaccuu

SEQ ID NO: 13647 - RNA, 21 nt, artificial
  Oligomer
cagaucgugcuuacuacuaug

SEQ ID NO: 13648 - RNA, 21 nt, artificial
  Oligomer
gcugcuguuuaguucugaaga

SEQ ID NO: 13649 - RNA, 21 nt, artificial
  Oligomer
gaccuggugcugcuguuuagu

SEQ ID NO: 13650 - RNA, 21 nt, artificial
  Oligomer
cagucccaucaucauccagcu

SEQ ID NO: 13651 - RNA, 21 nt, artificial
  Oligomer
aaagagagcgugaagaaggaa

SEQ ID NO: 13652 - RNA, 21 nt, artificial
  Oligomer
gcaaagauuuuaagaggaaag

SEQ ID NO: 13653 - RNA, 21 nt, artificial
  Oligomer
ugagaaaugccagcugucauu

SEQ ID NO: 13654 - RNA, 21 nt, artificial
  Oligomer
ccuccauacucagcucuuuaa

SEQ ID NO: 13655 - RNA, 21 nt, artificial
  Oligomer
cccugauauucuugaugucac

SEQ ID NO: 13656 - RNA, 21 nt, artificial
  Oligomer
agcccugauauucuugauguc

SEQ ID NO: 13657 - RNA, 21 nt, artificial
  Oligomer
aucgaugcguugcuuugguau

SEQ ID NO: 13658 - RNA, 21 nt, artificial
  Oligomer
agacuauguucuacaauugca

SEQ ID NO: 13659 - RNA, 21 nt, artificial
  Oligomer
cuccaucagaauccaccuuag

SEQ ID NO: 13660 - RNA, 21 nt, artificial
  Oligomer
ccacuaugagaacuucugagc

SEQ ID NO: 13661 - RNA, 21 nt, artificial
  Oligomer
caugcaccacuaugagaacuu

SEQ ID NO: 13662 - RNA, 21 nt, artificial
  Oligomer
ggcuaccauguucuuuccgac

SEQ ID NO: 13663 - RNA, 21 nt, artificial
  Oligomer
gccaucauguaugucuucgcc

SEQ ID NO: 13664 - RNA, 21 nt, artificial
  Oligomer
cgucuuugugaaugauggguc

SEQ ID NO: 13665 - RNA, 21 nt, artificial
  Oligomer
acaucuucucagucagcccac

SEQ ID NO: 13666 - RNA, 21 nt, artificial
  Oligomer
gcagucaaugucuacaucuuc

SEQ ID NO: 13667 - RNA, 21 nt, artificial
  Oligomer
gcaaccucauaaccuuccugc

SEQ ID NO: 13668 - RNA, 21 nt, artificial
  Oligomer
ucauguucucuuauaucuugc

SEQ ID NO: 13669 - RNA, 21 nt, artificial
  Oligomer
ucuccuucauguucucuuaua

SEQ ID NO: 13670 - RNA, 21 nt, artificial
  Oligomer
ugaagaagagguuuggcaaaa

SEQ ID NO: 13671 - RNA, 21 nt, artificial
  Oligomer
guaugaccuggugcugcuguu

SEQ ID NO: 13672 - RNA, 21 nt, artificial
  Oligomer
acugugcuugacuucuuugaa

SEQ ID NO: 13673 - RNA, 21 nt, artificial
  Oligomer
ugacugugcuugacuucuuug

SEQ ID NO: 13674 - RNA, 21 nt, artificial
  Oligomer
gcaaauucucccguacagacu

SEQ ID NO: 13675 - RNA, 21 nt, artificial
  Oligomer
gauuucggaguuggaggacaa

SEQ ID NO: 13676 - RNA, 21 nt, artificial
  Oligomer
ccagauuucggaguuggagga

SEQ ID NO: 13677 - RNA, 21 nt, artificial
  Oligomer
aggcaagaaguagagcacaga

SEQ ID NO: 13678 - RNA, 21 nt, artificial
  Oligomer
caaauccaguuuugguccuac

SEQ ID NO: 13679 - RNA, 21 nt, artificial
  Oligomer
uccuaaaaagcugagcuguaa

SEQ ID NO: 13680 - RNA, 21 nt, artificial
  Oligomer
cuauucccuccagcuccaaaa

SEQ ID NO: 13681 - RNA, 21 nt, artificial
  Oligomer
cugugaugcuuagaaccugga

SEQ ID NO: 13682 - RNA, 21 nt, artificial
  Oligomer
ugguauuugcuuggacugaca

SEQ ID NO: 13683 - RNA, 21 nt, artificial
  Oligomer
ucgaugcguugcuuugguauu

SEQ ID NO: 13684 - RNA, 21 nt, artificial
  Oligomer
gaaaagguacaauagugcuug

SEQ ID NO: 13685 - RNA, 21 nt, artificial
  Oligomer
agagugagggugaaggcaaga

SEQ ID NO: 13686 - RNA, 21 nt, artificial
  Oligomer
ugagaaaaggcaggagacuau

SEQ ID NO: 13687 - RNA, 21 nt, artificial
  Oligomer
gaauauugacccagacaauua

SEQ ID NO: 13688 - RNA, 21 nt, artificial
  Oligomer
ugccuucucuucugugcaccu

SEQ ID NO: 13689 - RNA, 21 nt, artificial
  Oligomer
guauccugccuucucuucugu

SEQ ID NO: 13690 - RNA, 21 nt, artificial
  Oligomer
caccacuaugagaacuucuga

SEQ ID NO: 13691 - RNA, 21 nt, artificial
  Oligomer
gcaccacuaugagaacuucug

SEQ ID NO: 13692 - RNA, 21 nt, artificial
  Oligomer
caucgccaccuaccagaacau

SEQ ID NO: 13693 - RNA, 21 nt, artificial
  Oligomer
cagaaguucuauuggugguuc

SEQ ID NO: 13694 - RNA, 21 nt, artificial
  Oligomer
cucaaccgcuaugugccuuuu

SEQ ID NO: 13695 - RNA, 21 nt, artificial
  Oligomer
acaucguguguguggcaaucu

SEQ ID NO: 13696 - RNA, 21 nt, artificial
  Oligomer
gccgagaacacaagaagcuac

SEQ ID NO: 13697 - RNA, 21 nt, artificial
  Oligomer
caaugucuuugucuggcauaa

SEQ ID NO: 13698 - RNA, 21 nt, artificial
  Oligomer
ccauuguccucgaccaguuug

SEQ ID NO: 13699 - RNA, 21 nt, artificial
  Oligomer
caaauucucccguacagacua

SEQ ID NO: 13700 - RNA, 21 nt, artificial
  Oligomer
gcaagaaguagagcacagaag

SEQ ID NO: 13701 - RNA, 21 nt, artificial
  Oligomer
ggucaagacauagaauguuuc

SEQ ID NO: 13702 - RNA, 21 nt, artificial
  Oligomer
cuaaaaagcugagcuguaaaa

SEQ ID NO: 13703 - RNA, 21 nt, artificial
  Oligomer
cagcccugauauucuugaugu

SEQ ID NO: 13704 - RNA, 21 nt, artificial
  Oligomer
ggaauuugugguggccucuga

SEQ ID NO: 13705 - RNA, 21 nt, artificial
  Oligomer
ucagcaacuuugaggagggca

SEQ ID NO: 13706 - RNA, 21 nt, artificial
  Oligomer
ugaugcuuagaaccuggacag

SEQ ID NO: 13707 - RNA, 21 nt, artificial
  Oligomer
cugacauuugagggaggagga

SEQ ID NO: 13708 - RNA, 21 nt, artificial
  Oligomer
gcuuugguauuugcuuggacu

SEQ ID NO: 13709 - RNA, 21 nt, artificial
  Oligomer
gaaaaggcaggagacuauguu

SEQ ID NO: 13710 - RNA, 21 nt, artificial
  Oligomer
ugcaccacuaugagaacuucu

SEQ ID NO: 13711 - RNA, 21 nt, artificial
  Oligomer
cagaaagugcugaaccggagu

SEQ ID NO: 13712 - RNA, 21 nt, artificial
  Oligomer
ugaguggcuggcugacaucau

SEQ ID NO: 13713 - RNA, 21 nt, artificial
  Oligomer
cauguaugucuucgccuccca

SEQ ID NO: 13714 - RNA, 21 nt, artificial
  Oligomer
gagagaaaggugagagugcag

SEQ ID NO: 13715 - RNA, 21 nt, artificial
  Oligomer
ccagcgucuccuucauguucu

SEQ ID NO: 13716 - RNA, 21 nt, artificial
  Oligomer
agaggcgcugcaagagaagau

SEQ ID NO: 13717 - RNA, 21 nt, artificial
  Oligomer
cugaagaagagguuuggcaaa

SEQ ID NO: 13718 - RNA, 21 nt, artificial
  Oligomer
acugaagaagagguuuggcaa

SEQ ID NO: 13719 - RNA, 21 nt, artificial
  Oligomer
gagguggagguggaaauggua

SEQ ID NO: 13720 - RNA, 21 nt, artificial
  Oligomer
agaggaaagaagacaucugaa

SEQ ID NO: 13721 - RNA, 21 nt, artificial
  Oligomer
aucauugcucucugcugccuu

SEQ ID NO: 13722 - RNA, 21 nt, artificial
  Oligomer
ugcagcccaaugucuuugucu

SEQ ID NO: 13723 - RNA, 21 nt, artificial
  Oligomer
ccugcagcccaaugucuuugu

SEQ ID NO: 13724 - RNA, 21 nt, artificial
  Oligomer
caggucaagacauagaauguu

SEQ ID NO: 13725 - RNA, 21 nt, artificial
  Oligomer
gacugacauuugagggaggag

SEQ ID NO: 13726 - RNA, 21 nt, artificial
  Oligomer
guauuugcuuggacugacauu

SEQ ID NO: 13727 - RNA, 21 nt, artificial
  Oligomer
ggaucucccaaagaagauaaa

SEQ ID NO: 13728 - RNA, 21 nt, artificial
  Oligomer
cccacuucaugcaccacuaug

SEQ ID NO: 13729 - RNA, 21 nt, artificial
  Oligomer
accuugauggaccguuuggag

SEQ ID NO: 13730 - RNA, 21 nt, artificial
  Oligomer
cagguaugacaggugugcuuc

SEQ ID NO: 13731 - RNA, 21 nt, artificial
  Oligomer
gcaaucuucucggccaucugu

SEQ ID NO: 13732 - RNA, 21 nt, artificial
  Oligomer
gguggucuucaugaaaggcuc

SEQ ID NO: 13733 - RNA, 21 nt, artificial
  Oligomer
caagaucccuaaggaguauga

SEQ ID NO: 13734 - RNA, 21 nt, artificial
  Oligomer
aaugucuuugucuggcauaaa

SEQ ID NO: 13735 - RNA, 21 nt, artificial
  Oligomer
cugcagcccaaugucuuuguc

SEQ ID NO: 13736 - RNA, 21 nt, artificial
  Oligomer
gaggacaacauagugguugaa

SEQ ID NO: 13737 - RNA, 21 nt, artificial
  Oligomer
ccaguuuugguccuacuaaau

SEQ ID NO: 13738 - RNA, 21 nt, artificial
  Oligomer
ccuagaagcaaccacugaugu

SEQ ID NO: 13739 - RNA, 21 nt, artificial
  Oligomer
uccuagaagcaaccacugaug

SEQ ID NO: 13740 - RNA, 21 nt, artificial
  Oligomer
gaauuugugguggccucugag

SEQ ID NO: 13741 - RNA, 21 nt, artificial
  Oligomer
aaggcaggagacuauguucua

SEQ ID NO: 13742 - RNA, 21 nt, artificial
  Oligomer
gagaaaaggcaggagacuaug

SEQ ID NO: 13743 - RNA, 21 nt, artificial
  Oligomer
gcuuccaguauccugccuucu

SEQ ID NO: 13744 - RNA, 21 nt, artificial
  Oligomer
cuaugagaacuucugagccug

SEQ ID NO: 13745 - RNA, 21 nt, artificial
  Oligomer
gaaagugcugaaccggagucu

SEQ ID NO: 13746 - RNA, 21 nt, artificial
  Oligomer
gugucugugcacauuuauguc

SEQ ID NO: 13747 - RNA, 21 nt, artificial
  Oligomer
ggacugaagaagagguuuggc

SEQ ID NO: 13748 - RNA, 21 nt, artificial
  Oligomer
gacaacauagugguugaagau

SEQ ID NO: 13749 - RNA, 21 nt, artificial
  Oligomer
ccaaaaggagcagcccuacuu

SEQ ID NO: 13750 - RNA, 21 nt, artificial
  Oligomer
ccacgcagucaaugucuacau

SEQ ID NO: 13751 - RNA, 21 nt, artificial
  Oligomer
gguggagguggaaaugguauu

SEQ ID NO: 13752 - RNA, 21 nt, artificial
  Oligomer
guagagcacagaagcaaagau

SEQ ID NO: 13753 - RNA, 21 nt, artificial
  Oligomer
ggagaauauugacccagacaa

SEQ ID NO: 13754 - RNA, 21 nt, artificial
  Oligomer
ugcuuccaguauccugccuuc

SEQ ID NO: 13755 - RNA, 21 nt, artificial
  Oligomer
ugaguacaagucaggacagug

SEQ ID NO: 13756 - RNA, 21 nt, artificial
  Oligomer
ggacgaauucuucaccaugau

SEQ ID NO: 13757 - RNA, 21 nt, artificial
  Oligomer
cugccuucccuuagugagucu

SEQ ID NO: 13758 - RNA, 21 nt, artificial
  Oligomer
ccucaaccuaagcagcucaca

SEQ ID NO: 13759 - RNA, 21 nt, artificial
  Oligomer
ggacaacauagugguugaaga

SEQ ID NO: 13760 - RNA, 21 nt, artificial
  Oligomer
ggaggacaacauagugguuga

SEQ ID NO: 13761 - RNA, 21 nt, artificial
  Oligomer
gggugaaggcaagaaguagag

SEQ ID NO: 13762 - RNA, 21 nt, artificial
  Oligomer
ccagucaggaucucccaaaga

SEQ ID NO: 13763 - RNA, 21 nt, artificial
  Oligomer
gggagaauauugacccagaca

SEQ ID NO: 13764 - RNA, 21 nt, artificial
  Oligomer
cagcugucgagucucguucau

SEQ ID NO: 13765 - RNA, 21 nt, artificial
  Oligomer
ugggagcucuucugacuggau

SEQ ID NO: 13766 - RNA, 21 nt, artificial
  Oligomer
caagaaggagauugaagacau

SEQ ID NO: 13767 - RNA, 21 nt, artificial
  Oligomer
ccaaauccaguuuugguccua

SEQ ID NO: 13768 - RNA, 21 nt, artificial
  Oligomer
ugagcaguucuucucuaccau

SEQ ID NO: 13769 - RNA, 21 nt, artificial
  Oligomer
uuccuuuuucaucgggcucuu

SEQ ID NO: 13770 - RNA, 21 nt, artificial
  Oligomer
aggaucucccaaagaagauaa

SEQ ID NO: 13771 - RNA, 21 nt, artificial
  Oligomer
cgcagucaaugucuacaucuu

SEQ ID NO: 13772 - RNA, 21 nt, artificial
  Oligomer
cccaaaagcugcagcaguaca

SEQ ID NO: 13773 - RNA, 21 nt, artificial
  Oligomer
agcugucgagucucguucauc

SEQ ID NO: 13774 - RNA, 21 nt, artificial
  Oligomer
cgaggugguggagucuauguu

SEQ ID NO: 13775 - RNA, 21 nt, artificial
  Oligomer
gugcugcuguuuaguucugaa

SEQ ID NO: 13776 - RNA, 21 nt, artificial
  Oligomer
ugaccgcuacugguuugagaa

SEQ ID NO: 13777 - RNA, 21 nt, artificial
  Oligomer
guccugaacaaggguuuucaa

SEQ ID NO: 13778 - RNA, 21 nt, artificial
  Oligomer
caucgggcucuuuccuaaaaa

SEQ ID NO: 13779 - RNA, 21 nt, artificial
  Oligomer
uccuuuuucaucgggcucuuu

SEQ ID NO: 13780 - RNA, 21 nt, artificial
  Oligomer
gcagaagcugugaugcuuaga

SEQ ID NO: 13781 - RNA, 21 nt, artificial
  Oligomer
cuaauugacuuccacaaaauc

SEQ ID NO: 13782 - RNA, 21 nt, artificial
  Oligomer
agaauauugacccagacaauu

SEQ ID NO: 13783 - RNA, 21 nt, artificial
  Oligomer
gggcagccaaaugcuguguaa

SEQ ID NO: 13784 - RNA, 21 nt, artificial
  Oligomer
caaggacgaauucuucaccau

SEQ ID NO: 13785 - RNA, 21 nt, artificial
  Oligomer
aggacaacauagugguugaag

SEQ ID NO: 13786 - RNA, 21 nt, artificial
  Oligomer
cucagcucuuuaacuuuucuu

SEQ ID NO: 13787 - RNA, 21 nt, artificial
  Oligomer
gucuauucccuccagcuccaa

SEQ ID NO: 13788 - RNA, 21 nt, artificial
  Oligomer
guauacaggauaccguccuuu

SEQ ID NO: 13789 - RNA, 21 nt, artificial
  Oligomer
ccaggaaugaccaagaaugua

SEQ ID NO: 13790 - RNA, 21 nt, artificial
  Oligomer
ccucaggaccaccaugcuaua

SEQ ID NO: 13791 - RNA, 21 nt, artificial
  Oligomer
gcguguuugcagaucgugcuu

SEQ ID NO: 13792 - RNA, 21 nt, artificial
  Oligomer
gaccaaggacccagagagaaa

SEQ ID NO: 13793 - RNA, 21 nt, artificial
  Oligomer
gcgcuaugacggcugguuuaa

SEQ ID NO: 13794 - RNA, 21 nt, artificial
  Oligomer
cugacaaggauggcaauggcu

SEQ ID NO: 13795 - RNA, 21 nt, artificial
  Oligomer
agacaucugaacccaacacca

SEQ ID NO: 13796 - RNA, 21 nt, artificial
  Oligomer
cuucccuuagugagucugcuu

SEQ ID NO: 13797 - RNA, 21 nt, artificial
  Oligomer
gaaugggcuguucuccaagaa

SEQ ID NO: 13798 - RNA, 21 nt, artificial
  Oligomer
ccgcuacugguuugagaacac

SEQ ID NO: 13799 - RNA, 21 nt, artificial
  Oligomer
cuggagugaucucaacccuaa

SEQ ID NO: 13800 - RNA, 21 nt, artificial
  Oligomer
ggaguuggaggacaacauagu

SEQ ID NO: 13801 - RNA, 21 nt, artificial
  Oligomer
ucggaguuggaggacaacaua

SEQ ID NO: 13802 - RNA, 21 nt, artificial
  Oligomer
ugaaggcaagaaguagagcac

SEQ ID NO: 13803 - RNA, 21 nt, artificial
  Oligomer
cugaugugauuucuaccaaau

SEQ ID NO: 13804 - RNA, 21 nt, artificial
  Oligomer
uucaucgggcucuuuccuaaa

SEQ ID NO: 13805 - RNA, 21 nt, artificial
  Oligomer
uguucuacaauugcagugcau

SEQ ID NO: 13806 - RNA, 21 nt, artificial
  Oligomer
cagaaaacacucccggaguau

SEQ ID NO: 13807 - RNA, 21 nt, artificial
  Oligomer
gcagaaaacacucccggagua

SEQ ID NO: 13808 - RNA, 21 nt, artificial
  Oligomer
ucuccaucagaauccaccuua

SEQ ID NO: 13809 - RNA, 21 nt, artificial
  Oligomer
uucuuuggcuaccauguucuu

SEQ ID NO: 13810 - RNA, 21 nt, artificial
  Oligomer
ccucaaccgcuaugugccuuu

SEQ ID NO: 13811 - RNA, 21 nt, artificial
  Oligomer
ccugcgagagacuuuccucaa

SEQ ID NO: 13812 - RNA, 21 nt, artificial
  Oligomer
gccaucuguguuggcguguuu

SEQ ID NO: 13813 - RNA, 21 nt, artificial
  Oligomer
ccuggacugaagaagagguuu

SEQ ID NO: 13814 - RNA, 21 nt, artificial
  Oligomer
ugagaauggcuuccucuccaa

SEQ ID NO: 13815 - RNA, 21 nt, artificial
  Oligomer
agaggauaagucccgucuaau

SEQ ID NO: 13816 - RNA, 21 nt, artificial
  Oligomer
ggacauccugguggucuucau

SEQ ID NO: 13817 - RNA, 21 nt, artificial
  Oligomer
ugacaaggauggcaauggcua

SEQ ID NO: 13818 - RNA, 21 nt, artificial
  Oligomer
ugcugcuguuuaguucugaag

SEQ ID NO: 13819 - RNA, 21 nt, artificial
  Oligomer
ggaagcagccaaagauggagu

SEQ ID NO: 13820 - RNA, 21 nt, artificial
  Oligomer
cucuggagugguggccuauuu

SEQ ID NO: 13821 - RNA, 21 nt, artificial
  Oligomer
gccaucaccaucauugcucuc

SEQ ID NO: 13822 - RNA, 21 nt, artificial
  Oligomer
cuggucgcuguuaucaacauu

SEQ ID NO: 13823 - RNA, 21 nt, artificial
  Oligomer
uggagugaucucaacccuaau

SEQ ID NO: 13824 - RNA, 21 nt, artificial
  Oligomer
acuggagugaucucaacccua

SEQ ID NO: 13825 - RNA, 21 nt, artificial
  Oligomer
gaagguccugaacaaggguuu

SEQ ID NO: 13826 - RNA, 21 nt, artificial
  Oligomer
gcaguucuucucuaccauggu

SEQ ID NO: 13827 - RNA, 21 nt, artificial
  Oligomer
cucugccagauauucaguacu

SEQ ID NO: 13828 - RNA, 21 nt, artificial
  Oligomer
cacaaaaucgaugcguugcuu

SEQ ID NO: 13829 - RNA, 21 nt, artificial
  Oligomer
caauagugcuugucuccgaua

SEQ ID NO: 13830 - RNA, 21 nt, artificial
  Oligomer
acaauagugcuugucuccgau

SEQ ID NO: 13831 - RNA, 21 nt, artificial
  Oligomer
cggaguauacaggauaccguc

SEQ ID NO: 13832 - RNA, 21 nt, artificial
  Oligomer
acucccggaguauacaggaua

SEQ ID NO: 13833 - RNA, 21 nt, artificial
  Oligomer
ugggagaauauugacccagac

SEQ ID NO: 13834 - RNA, 21 nt, artificial
  Oligomer
uccaguauccugccuucucuu

SEQ ID NO: 13835 - RNA, 21 nt, artificial
  Oligomer
gcugacaucauccaagaggug

SEQ ID NO: 13836 - RNA, 21 nt, artificial
  Oligomer
gcaaucaucuauggaggugac

SEQ ID NO: 13837 - RNA, 21 nt, artificial
  Oligomer
ccauggcagcuaugcucugau

SEQ ID NO: 13838 - RNA, 21 nt, artificial
  Oligomer
ccagaaguucuauuggugguu

SEQ ID NO: 13839 - RNA, 21 nt, artificial
  Oligomer
acgcagucaaugucuacaucu

SEQ ID NO: 13840 - RNA, 21 nt, artificial
  Oligomer
gcacaucguguguguggcaau

SEQ ID NO: 13841 - RNA, 21 nt, artificial
  Oligomer
guacaagcgcuucguggagaa

SEQ ID NO: 13842 - RNA, 21 nt, artificial
  Oligomer
aggaaggcugugacaaagcag

SEQ ID NO: 13843 - RNA, 21 nt, artificial
  Oligomer
ggugcugcuguuuaguucuga

SEQ ID NO: 13844 - RNA, 21 nt, artificial
  Oligomer
cuggugcugcuguuuaguucu

SEQ ID NO: 13845 - RNA, 21 nt, artificial
  Oligomer
agagcacagaagcaaagauuu

SEQ ID NO: 13846 - RNA, 21 nt, artificial
  Oligomer
gaaguagagcacagaagcaaa

SEQ ID NO: 13847 - RNA, 21 nt, artificial
  Oligomer
gaguuggaggacaacauagug

SEQ ID NO: 13848 - RNA, 21 nt, artificial
  Oligomer
gguccugaacaaggguuuuca

SEQ ID NO: 13849 - RNA, 21 nt, artificial
  Oligomer
ggaagguccugaacaaggguu

SEQ ID NO: 13850 - RNA, 21 nt, artificial
  Oligomer
cauacucagcucuuuaacuuu

SEQ ID NO: 13851 - RNA, 21 nt, artificial
  Oligomer
ccagccucucugccagauauu

SEQ ID NO: 13852 - RNA, 21 nt, artificial
  Oligomer
agaagcugugaugcuuagaac

SEQ ID NO: 13853 - RNA, 21 nt, artificial
  Oligomer
cuuccacaaaaucgaugcguu

SEQ ID NO: 13854 - RNA, 21 nt, artificial
  Oligomer
cagucaggaucucccaaagaa

SEQ ID NO: 13855 - RNA, 21 nt, artificial
  Oligomer
accagucaggaucucccaaag

SEQ ID NO: 13856 - RNA, 21 nt, artificial
  Oligomer
ccaccuguuuaucaacggcac

SEQ ID NO: 13857 - RNA, 21 nt, artificial
  Oligomer
caauugcagugcaugaugauu

SEQ ID NO: 13858 - RNA, 21 nt, artificial
  Oligomer
gcaggagacuauguucuacaa

SEQ ID NO: 13859 - RNA, 21 nt, artificial
  Oligomer
ugcagaaaacacucccggagu

SEQ ID NO: 13860 - RNA, 21 nt, artificial
  Oligomer
cucccaauauugggagaauau

SEQ ID NO: 13861 - RNA, 21 nt, artificial
  Oligomer
cugcuuccaguauccugccuu

SEQ ID NO: 13862 - RNA, 21 nt, artificial
  Oligomer
cccuccaggaaugaccaagaa

SEQ ID NO: 13863 - RNA, 21 nt, artificial
  Oligomer
caggaccaccaugcuauacau

SEQ ID NO: 13864 - RNA, 21 nt, artificial
  Oligomer
cuggugucugugcacauuuau

SEQ ID NO: 13865 - RNA, 21 nt, artificial
  Oligomer
caggaguggcauaaauuugag

SEQ ID NO: 13866 - RNA, 21 nt, artificial
  Oligomer
cacgcagucaaugucuacauc

SEQ ID NO: 13867 - RNA, 21 nt, artificial
  Oligomer
gaggugguggagucuauguuc

SEQ ID NO: 13868 - RNA, 21 nt, artificial
  Oligomer
ccagaggauaagucccgucua

SEQ ID NO: 13869 - RNA, 21 nt, artificial
  Oligomer
ugagcgagaaggagcuauuua

SEQ ID NO: 13870 - RNA, 21 nt, artificial
  Oligomer
gcugcucaagaucccuaagga

SEQ ID NO: 13871 - RNA, 21 nt, artificial
  Oligomer
gaagcuacaaaagaaacucaa

SEQ ID NO: 13872 - RNA, 21 nt, artificial
  Oligomer
caaccuaagcagcucacaacu

SEQ ID NO: 13873 - RNA, 21 nt, artificial
  Oligomer
cucaaccuaagcagcucacaa

SEQ ID NO: 13874 - RNA, 21 nt, artificial
  Oligomer
ccaagaaggagauugaagaca

SEQ ID NO: 13875 - RNA, 21 nt, artificial
  Oligomer
ugguuugagaacaccaggaau

SEQ ID NO: 13876 - RNA, 21 nt, artificial
  Oligomer
cugguuugagaacaccaggaa

SEQ ID NO: 13877 - RNA, 21 nt, artificial
  Oligomer
cccuguacaaccaggaccuau

SEQ ID NO: 13878 - RNA, 21 nt, artificial
  Oligomer
cuacaugagaaaugccagcug

SEQ ID NO: 13879 - RNA, 21 nt, artificial
  Oligomer
uccaguuuugguccuacuaaa

SEQ ID NO: 13880 - RNA, 21 nt, artificial
  Oligomer
cauguacauguuuuaccacca

SEQ ID NO: 13881 - RNA, 21 nt, artificial
  Oligomer
gggcucuuuccuaaaaagcug

SEQ ID NO: 13882 - RNA, 21 nt, artificial
  Oligomer
ccauacucagcucuuuaacuu

SEQ ID NO: 13883 - RNA, 21 nt, artificial
  Oligomer
ccaaagugucagcaacuuuga

SEQ ID NO: 13884 - RNA, 21 nt, artificial
  Oligomer
caaaaggagcagcccuacuuc

SEQ ID NO: 13885 - RNA, 21 nt, artificial
  Oligomer
ccacaaaaucgaugcguugcu

SEQ ID NO: 13886 - RNA, 21 nt, artificial
  Oligomer
cuacaauugcagugcaugaug

SEQ ID NO: 13887 - RNA, 21 nt, artificial
  Oligomer
ccaauauugggagaauauuga

SEQ ID NO: 13888 - RNA, 21 nt, artificial
  Oligomer
ccucccaauauugggagaaua

SEQ ID NO: 13889 - RNA, 21 nt, artificial
  Oligomer
cccucccaauauugggagaau

SEQ ID NO: 13890 - RNA, 21 nt, artificial
  Oligomer
gaagagugagggugaaggcaa

SEQ ID NO: 13891 - RNA, 21 nt, artificial
  Oligomer
ccuccaggaaugaccaagaau

SEQ ID NO: 13892 - RNA, 21 nt, artificial
  Oligomer
gcacuuccagaaagugcugaa

SEQ ID NO: 13893 - RNA, 21 nt, artificial
  Oligomer
ggcagccaaaugcuguguaag

SEQ ID NO: 13894 - RNA, 21 nt, artificial
  Oligomer
ccaucaggaguggcauaaauu

SEQ ID NO: 13895 - RNA, 21 nt, artificial
  Oligomer
cgaguuccucaacauccgcau

SEQ ID NO: 13896 - RNA, 21 nt, artificial
  Oligomer
ccggcaaucaucuauggaggu

SEQ ID NO: 13897 - RNA, 21 nt, artificial
  Oligomer
aaccgcuaugugccuuuugau

SEQ ID NO: 13898 - RNA, 21 nt, artificial
  Oligomer
guguuugcagaucgugcuuac

SEQ ID NO: 13899 - RNA, 21 nt, artificial
  Oligomer
cugguuuaacaaccugaggca

SEQ ID NO: 13900 - RNA, 21 nt, artificial
  Oligomer
acggcugguuuaacaaccuga

SEQ ID NO: 13901 - RNA, 21 nt, artificial
  Oligomer
gacggcugguuuaacaaccug

SEQ ID NO: 13902 - RNA, 21 nt, artificial
  Oligomer
ccugguggucuucaugaaagg

SEQ ID NO: 13903 - RNA, 21 nt, artificial
  Oligomer
gaugagcgagaaggagcuauu

SEQ ID NO: 13904 - RNA, 21 nt, artificial
  Oligomer
gcucaagaucccuaaggagua

SEQ ID NO: 13905 - RNA, 21 nt, artificial
  Oligomer
caaagauggagugccagcgau

SEQ ID NO: 13906 - RNA, 21 nt, artificial
  Oligomer
cccaaugucuuugucuggcau

SEQ ID NO: 13907 - RNA, 21 nt, artificial
  Oligomer
ggucgcuguuaucaacauuga

SEQ ID NO: 13908 - RNA, 21 nt, artificial
  Oligomer
cgugcuggucgcuguuaucaa

SEQ ID NO: 13909 - RNA, 21 nt, artificial
  Oligomer
gagauugaagacauccgaaau

SEQ ID NO: 13910 - RNA, 21 nt, artificial
  Oligomer
gagcacagaagcaaagauuuu

SEQ ID NO: 13911 - RNA, 21 nt, artificial
  Oligomer
cuguucuccaagaaggagauu

SEQ ID NO: 13912 - RNA, 21 nt, artificial
  Oligomer
ugccauuguccucgaccaguu

SEQ ID NO: 13913 - RNA, 21 nt, artificial
  Oligomer
aaggaacuggagugaucucaa

SEQ ID NO: 13914 - RNA, 21 nt, artificial
  Oligomer
cggaguuggaggacaacauag

SEQ ID NO: 13915 - RNA, 21 nt, artificial
  Oligomer
acugaugugauuucuaccaaa

SEQ ID NO: 13916 - RNA, 21 nt, artificial
  Oligomer
acucagcucuuuaacuuuucu

SEQ ID NO: 13917 - RNA, 21 nt, artificial
  Oligomer
cagaagcugugaugcuuagaa

SEQ ID NO: 13918 - RNA, 21 nt, artificial
  Oligomer
gugcagaagcugugaugcuua

SEQ ID NO: 13919 - RNA, 21 nt, artificial
  Oligomer
acaggauaccguccuuuccua

SEQ ID NO: 13920 - RNA, 21 nt, artificial
  Oligomer
ccggaguauacaggauaccgu

SEQ ID NO: 13921 - RNA, 21 nt, artificial
  Oligomer
agaaaacacucccggaguaua

SEQ ID NO: 13922 - RNA, 21 nt, artificial
  Oligomer
caauauugggagaauauugac

SEQ ID NO: 13923 - RNA, 21 nt, artificial
  Oligomer
cccaauauugggagaauauug

SEQ ID NO: 13924 - RNA, 21 nt, artificial
  Oligomer
ccagcuuccugcagaaaacac

SEQ ID NO: 13925 - RNA, 21 nt, artificial
  Oligomer
gcccacuucaugcaccacuau

SEQ ID NO: 13926 - RNA, 21 nt, artificial
  Oligomer
accuggugucugugcacauuu

SEQ ID NO: 13927 - RNA, 21 nt, artificial
  Oligomer
ggcugacaucauccaagaggu

SEQ ID NO: 13928 - RNA, 21 nt, artificial
  Oligomer
cuguaccuugauggaccguuu

SEQ ID NO: 13929 - RNA, 21 nt, artificial
  Oligomer
cccaaggcuuugaguacaagu

SEQ ID NO: 13930 - RNA, 21 nt, artificial
  Oligomer
caaucaucuauggaggugaca

SEQ ID NO: 13931 - RNA, 21 nt, artificial
  Oligomer
gagacuuuccucaaccgcuau

SEQ ID NO: 13932 - RNA, 21 nt, artificial
  Oligomer
cgucuccuucauguucucuua

SEQ ID NO: 13933 - RNA, 21 nt, artificial
  Oligomer
gcgucuccuucauguucucuu

SEQ ID NO: 13934 - RNA, 21 nt, artificial
  Oligomer
gcagaucgugcuuacuacuau

SEQ ID NO: 13935 - RNA, 21 nt, artificial
  Oligomer
ggauuuucacuucaugcugcg

SEQ ID NO: 13936 - RNA, 21 nt, artificial
  Oligomer
cuucaccaugaugcgauccuu

SEQ ID NO: 13937 - RNA, 21 nt, artificial
  Oligomer
cgaauucuucaccaugaugcg

SEQ ID NO: 13938 - RNA, 21 nt, artificial
  Oligomer
ggauaagucccgucuaauguu

SEQ ID NO: 13939 - RNA, 21 nt, artificial
  Oligomer
cccuaaggaguaugaccuggu

SEQ ID NO: 13940 - RNA, 21 nt, artificial
  Oligomer
cucaagaucccuaaggaguau

SEQ ID NO: 13941 - RNA, 21 nt, artificial
  Oligomer
agaggagcagucccaucauca

SEQ ID NO: 13942 - RNA, 21 nt, artificial
  Oligomer
ccaucaccaucauugcucucu

SEQ ID NO: 13943 - RNA, 21 nt, artificial
  Oligomer
ccuaagcagcucacaacugac

SEQ ID NO: 13944 - RNA, 21 nt, artificial
  Oligomer
gucgcuguuaucaacauugac

SEQ ID NO: 13945 - RNA, 21 nt, artificial
  Oligomer
ggaaugggcuguucuccaaga

SEQ ID NO: 13946 - RNA, 21 nt, artificial
  Oligomer
ggagugaucucaacccuaaug

SEQ ID NO: 13947 - RNA, 21 nt, artificial
  Oligomer
cccaaggaacuggagugaucu

SEQ ID NO: 13948 - RNA, 21 nt, artificial
  Oligomer
aaggguuuucaaagcucccaa

SEQ ID NO: 13949 - RNA, 21 nt, artificial
  Oligomer
gcaaccacugaugugauuucu

SEQ ID NO: 13950 - RNA, 21 nt, artificial
  Oligomer
cacccaggucaagacauagaa

SEQ ID NO: 13951 - RNA, 21 nt, artificial
  Oligomer
cucauuuguauaauugucugg

SEQ ID NO: 13952 - RNA, 21 nt, artificial
  Oligomer
uuuagggugguguuggguuca

SEQ ID NO: 13953 - RNA, 21 nt, artificial
  Oligomer
ucauuuguauaauugucuggg

SEQ ID NO: 13954 - RNA, 21 nt, artificial
  Oligomer
auugucugggucaauauucuc

SEQ ID NO: 13955 - RNA, 21 nt, artificial
  Oligomer
uacaugguaaacauuagacgg

SEQ ID NO: 13956 - RNA, 21 nt, artificial
  Oligomer
cauuuguauaauugucugggu

SEQ ID NO: 13957 - RNA, 21 nt, artificial
  Oligomer
aucuucuuacacagcauuugg

SEQ ID NO: 13958 - RNA, 21 nt, artificial
  Oligomer
auacaugguaaacauuagacg

SEQ ID NO: 13959 - RNA, 21 nt, artificial
  Oligomer
ugguuuagggugguguugggu

SEQ ID NO: 13960 - RNA, 21 nt, artificial
  Oligomer
uuucucauguagacaccaggg

SEQ ID NO: 13961 - RNA, 21 nt, artificial
  Oligomer
ggaauugagaucgaguacuga

SEQ ID NO: 13962 - RNA, 21 nt, artificial
  Oligomer
uuuguggaagucaauuagaga

SEQ ID NO: 13963 - RNA, 21 nt, artificial
  Oligomer
gauaucucuaauaccauuucc

SEQ ID NO: 13964 - RNA, 21 nt, artificial
  Oligomer
acagccuuccuaaauagcucc

SEQ ID NO: 13965 - RNA, 21 nt, artificial
  Oligomer
uuaaaaucuuugcuucugugc

SEQ ID NO: 13966 - RNA, 21 nt, artificial
  Oligomer
uuuuguggaagucaauuagag

SEQ ID NO: 13967 - RNA, 21 nt, artificial
  Oligomer
uuccuaaauagcuccuucucg

SEQ ID NO: 13968 - RNA, 21 nt, artificial
  Oligomer
uuggacaggaugagguugacc

SEQ ID NO: 13969 - RNA, 21 nt, artificial
  Oligomer
aaagcaacgcaucgauuuugu

SEQ ID NO: 13970 - RNA, 21 nt, artificial
  Oligomer
aaguagauguggaaagugggc

SEQ ID NO: 13971 - RNA, 21 nt, artificial
  Oligomer
aucauucacaaagacguuggg

SEQ ID NO: 13972 - RNA, 21 nt, artificial
  Oligomer
auauaagagaacaugaaggag

SEQ ID NO: 13973 - RNA, 21 nt, artificial
  Oligomer
aaauccucccaugucagcucc

SEQ ID NO: 13974 - RNA, 21 nt, artificial
  Oligomer
ugugguuuagggugguguugg

SEQ ID NO: 13975 - RNA, 21 nt, artificial
  Oligomer
ugucacagccuuccuaaauag

SEQ ID NO: 13976 - RNA, 21 nt, artificial
  Oligomer
gucacagccuuccuaaauagc

SEQ ID NO: 13977 - RNA, 21 nt, artificial
  Oligomer
uuguuggacaggaugagguug

SEQ ID NO: 13978 - RNA, 21 nt, artificial
  Oligomer
uguuggguucagaugucuucu

SEQ ID NO: 13979 - RNA, 21 nt, artificial
  Oligomer
uuguagcuucuuguguucucg

SEQ ID NO: 13980 - RNA, 21 nt, artificial
  Oligomer
uucucccgaauccaguaguug

SEQ ID NO: 13981 - RNA, 21 nt, artificial
  Oligomer
guggaagucaauuagagaugu

SEQ ID NO: 13982 - RNA, 21 nt, artificial
  Oligomer
gaagucaauuagagauguggg

SEQ ID NO: 13983 - RNA, 21 nt, artificial
  Oligomer
cuauuguaccuuuucaccucc

SEQ ID NO: 13984 - RNA, 21 nt, artificial
  Oligomer
caauuguagaacauagucucc

SEQ ID NO: 13985 - RNA, 21 nt, artificial
  Oligomer
gaaguagauguggaaaguggg

SEQ ID NO: 13986 - RNA, 21 nt, artificial
  Oligomer
auggugagcaagauauaagag

SEQ ID NO: 13987 - RNA, 21 nt, artificial
  Oligomer
uaucucuaauaccauuuccac

SEQ ID NO: 13988 - RNA, 21 nt, artificial
  Oligomer
ucuaauaccauuuccaccucc

SEQ ID NO: 13989 - RNA, 21 nt, artificial
  Oligomer
uuucuuuuguagcuucuugug

SEQ ID NO: 13990 - RNA, 21 nt, artificial
  Oligomer
uuuuguagcuucuuguguucu

SEQ ID NO: 13991 - RNA, 21 nt, artificial
  Oligomer
aaacuggucgaggacaauggc

SEQ ID NO: 13992 - RNA, 21 nt, artificial
  Oligomer
ucgaguacugaauaucuggca

SEQ ID NO: 13993 - RNA, 21 nt, artificial
  Oligomer
cuuauaaucaucaugcacugc

SEQ ID NO: 13994 - RNA, 21 nt, artificial
  Oligomer
cucuacauucuuggucauucc

SEQ ID NO: 13995 - RNA, 21 nt, artificial
  Oligomer
caaaauggccaggacaacagc

SEQ ID NO: 13996 - RNA, 21 nt, artificial
  Oligomer
aaaauggccaggacaacagca

SEQ ID NO: 13997 - RNA, 21 nt, artificial
  Oligomer
aggaagguuaugagguugcgg

SEQ ID NO: 13998 - RNA, 21 nt, artificial
  Oligomer
uaauaccauuuccaccuccac

SEQ ID NO: 13999 - RNA, 21 nt, artificial
  Oligomer
uuggguucagaugucuucuuu

SEQ ID NO: 14000 - RNA, 21 nt, artificial
  Oligomer
auccaguaguuguugcagacc

SEQ ID NO: 14001 - RNA, 21 nt, artificial
  Oligomer
auuucucauguagacaccagg

SEQ ID NO: 14002 - RNA, 21 nt, artificial
  Oligomer
uauuuaguaggaccaaaacug

SEQ ID NO: 14003 - RNA, 21 nt, artificial
  Oligomer
uaaagagcugaguauggaggg

SEQ ID NO: 14004 - RNA, 21 nt, artificial
  Oligomer
uggaagucaauuagagaugug

SEQ ID NO: 14005 - RNA, 21 nt, artificial
  Oligomer
uauuguaccuuuucaccucca

SEQ ID NO: 14006 - RNA, 21 nt, artificial
  Oligomer
uuucaccuccacacuugucac

SEQ ID NO: 14007 - RNA, 21 nt, artificial
  Oligomer
guggucuuuaucuucuuuggg

SEQ ID NO: 14008 - RNA, 21 nt, artificial
  Oligomer
uuuguauaauugucuggguca

SEQ ID NO: 14009 - RNA, 21 nt, artificial
  Oligomer
aggccuucucuacauucuugg

SEQ ID NO: 14010 - RNA, 21 nt, artificial
  Oligomer
ucaccuccauagaugauugcc

SEQ ID NO: 14011 - RNA, 21 nt, artificial
  Oligomer
uagauguggaaagugggcagc

SEQ ID NO: 14012 - RNA, 21 nt, artificial
  Oligomer
uagagcaggauguagaggugg

SEQ ID NO: 14013 - RNA, 21 nt, artificial
  Oligomer
aagacauacaugauggccagg

SEQ ID NO: 14014 - RNA, 21 nt, artificial
  Oligomer
uuuuugccaaaccucuucuuc

SEQ ID NO: 14015 - RNA, 21 nt, artificial
  Oligomer
uggguucagaugucuucuuuc

SEQ ID NO: 14016 - RNA, 21 nt, artificial
  Oligomer
caucuuuggcugcuuccuucu

SEQ ID NO: 14017 - RNA, 21 nt, artificial
  Oligomer
uuuggcugcuuccuucuucac

SEQ ID NO: 14018 - RNA, 21 nt, artificial
  Oligomer
ucuuugaguuucuuuuguagc

SEQ ID NO: 14019 - RNA, 21 nt, artificial
  Oligomer
uucuuuuguagcuucuugugu

SEQ ID NO: 14020 - RNA, 21 nt, artificial
  Oligomer
uaugccagacaaagacauugg

SEQ ID NO: 14021 - RNA, 21 nt, artificial
  Oligomer
ucccgaauccaguaguuguug

SEQ ID NO: 14022 - RNA, 21 nt, artificial
  Oligomer
uaguuguugcagacccugaga

SEQ ID NO: 14023 - RNA, 21 nt, artificial
  Oligomer
ggaaaagaaaaguuaaagagc

SEQ ID NO: 14024 - RNA, 21 nt, artificial
  Oligomer
aguggucuuuaucuucuuugg

SEQ ID NO: 14025 - RNA, 21 nt, artificial
  Oligomer
auuuguauaauugucuggguc

SEQ ID NO: 14026 - RNA, 21 nt, artificial
  Oligomer
auagcugccauggaugaugag

SEQ ID NO: 14027 - RNA, 21 nt, artificial
  Oligomer
aagaaccaccaauagaacuuc

SEQ ID NO: 14028 - RNA, 21 nt, artificial
  Oligomer
caucauucacaaagacguugg

SEQ ID NO: 14029 - RNA, 21 nt, artificial
  Oligomer
agcaugaagugaaaauccucc

SEQ ID NO: 14030 - RNA, 21 nt, artificial
  Oligomer
cauacaugguaaacauuagac

SEQ ID NO: 14031 - RNA, 21 nt, artificial
  Oligomer
cagccuuccuaaauagcuccu

SEQ ID NO: 14032 - RNA, 21 nt, artificial
  Oligomer
cuuccuaaauagcuccuucuc

SEQ ID NO: 14033 - RNA, 21 nt, artificial
  Oligomer
cucuuugaguuucuuuuguag

SEQ ID NO: 14034 - RNA, 21 nt, artificial
  Oligomer
cuuuuguagcuucuuguguuc

SEQ ID NO: 14035 - RNA, 21 nt, artificial
  Oligomer
aauccaguaguuguugcagac

SEQ ID NO: 14036 - RNA, 21 nt, artificial
  Oligomer
acauucuaugucuugaccugg

SEQ ID NO: 14037 - RNA, 21 nt, artificial
  Oligomer
gaucgaguacugaauaucugg

SEQ ID NO: 14038 - RNA, 21 nt, artificial
  Oligomer
aucaagaauaucagggcuggg

SEQ ID NO: 14039 - RNA, 21 nt, artificial
  Oligomer
ggaagucaauuagagaugugg

SEQ ID NO: 14040 - RNA, 21 nt, artificial
  Oligomer
auuguaccuuuucaccuccac

SEQ ID NO: 14041 - RNA, 21 nt, artificial
  Oligomer
aaacagguggacuuauaauca

SEQ ID NO: 14042 - RNA, 21 nt, artificial
  Oligomer
guggacuuauaaucaucaugc

SEQ ID NO: 14043 - RNA, 21 nt, artificial
  Oligomer
aucaucaugcacugcaauugu

SEQ ID NO: 14044 - RNA, 21 nt, artificial
  Oligomer
auuguagaacauagucuccug

SEQ ID NO: 14045 - RNA, 21 nt, artificial
  Oligomer
cugacaccucaaauuuaugcc

SEQ ID NO: 14046 - RNA, 21 nt, artificial
  Oligomer
acauacaugauggccaggacc

SEQ ID NO: 14047 - RNA, 21 nt, artificial
  Oligomer
caggaagguuaugagguugcg

SEQ ID NO: 14048 - RNA, 21 nt, artificial
  Oligomer
gauauaagagaacaugaagga

SEQ ID NO: 14049 - RNA, 21 nt, artificial
  Oligomer
aaagccauaguaguaagcacg

SEQ ID NO: 14050 - RNA, 21 nt, artificial
  Oligomer
cagcaugaagugaaaauccuc

SEQ ID NO: 14051 - RNA, 21 nt, artificial
  Oligomer
acaugguaaacauuagacggg

SEQ ID NO: 14052 - RNA, 21 nt, artificial
  Oligomer
uguagcuucuuguguucucgg

SEQ ID NO: 14053 - RNA, 21 nt, artificial
  Oligomer
uagcuucuuguguucucggcc

SEQ ID NO: 14054 - RNA, 21 nt, artificial
  Oligomer
uccucuuaaaaucuuugcuuc

SEQ ID NO: 14055 - RNA, 21 nt, artificial
  Oligomer
uucugugcucuacuucuugcc

SEQ ID NO: 14056 - RNA, 21 nt, artificial
  Oligomer
gagaucgaguacugaauaucu

SEQ ID NO: 14057 - RNA, 21 nt, artificial
  Oligomer
aaauaccaaagcaacgcaucg

SEQ ID NO: 14058 - RNA, 21 nt, artificial
  Oligomer
acugacaccucaaauuuaugc

SEQ ID NO: 14059 - RNA, 21 nt, artificial
  Oligomer
uccugacuuguacucaaagcc

SEQ ID NO: 14060 - RNA, 21 nt, artificial
  Oligomer
aggaaguagauguggaaagug

SEQ ID NO: 14061 - RNA, 21 nt, artificial
  Oligomer
augaugagcagggcauagagc

SEQ ID NO: 14062 - RNA, 21 nt, artificial
  Oligomer
aggcgaagacauacaugaugg

SEQ ID NO: 14063 - RNA, 21 nt, artificial
  Oligomer
cugacugagaagauguagaca

SEQ ID NO: 14064 - RNA, 21 nt, artificial
  Oligomer
aaauggccaggacaacagcag

SEQ ID NO: 14065 - RNA, 21 nt, artificial
  Oligomer
auaagagaacaugaaggagac

SEQ ID NO: 14066 - RNA, 21 nt, artificial
  Oligomer
aagccauaguaguaagcacga

SEQ ID NO: 14067 - RNA, 21 nt, artificial
  Oligomer
caaacacgccaacacagaugg

SEQ ID NO: 14068 - RNA, 21 nt, artificial
  Oligomer
aucucuaauaccauuuccacc

SEQ ID NO: 14069 - RNA, 21 nt, artificial
  Oligomer
cacucucaccuuucucucugg

SEQ ID NO: 14070 - RNA, 21 nt, artificial
  Oligomer
gcaugaagugaaaauccuccc

SEQ ID NO: 14071 - RNA, 21 nt, artificial
  Oligomer
caugaagugaaaauccuccca

SEQ ID NO: 14072 - RNA, 21 nt, artificial
  Oligomer
uuguuaaaccagccgucauag

SEQ ID NO: 14073 - RNA, 21 nt, artificial
  Oligomer
augguaaacauuagacgggac

SEQ ID NO: 14074 - RNA, 21 nt, artificial
  Oligomer
uccuaaauagcuccuucucgc

SEQ ID NO: 14075 - RNA, 21 nt, artificial
  Oligomer
uccucuucagaacuaaacagc

SEQ ID NO: 14076 - RNA, 21 nt, artificial
  Oligomer
cuuuggcugcuuccuucuuca

SEQ ID NO: 14077 - RNA, 21 nt, artificial
  Oligomer
guuucuuuuguagcuucuugu

SEQ ID NO: 14078 - RNA, 21 nt, artificial
  Oligomer
aaagaagucaagcacagucag

SEQ ID NO: 14079 - RNA, 21 nt, artificial
  Oligomer
agcuuugaaaacccuuguuca

SEQ ID NO: 14080 - RNA, 21 nt, artificial
  Oligomer
uuuacagcucagcuuuuuagg

SEQ ID NO: 14081 - RNA, 21 nt, artificial
  Oligomer
ugacaucaagaauaucagggc

SEQ ID NO: 14082 - RNA, 21 nt, artificial
  Oligomer
uccucccucaaaugucagucc

SEQ ID NO: 14083 - RNA, 21 nt, artificial
  Oligomer
uuuucaccuccacacuuguca

SEQ ID NO: 14084 - RNA, 21 nt, artificial
  Oligomer
uuaggugcacagaagagaagg

SEQ ID NO: 14085 - RNA, 21 nt, artificial
  Oligomer
acucauacacagcgauguucu

SEQ ID NO: 14086 - RNA, 21 nt, artificial
  Oligomer
ucuucuuacacagcauuuggc

SEQ ID NO: 14087 - RNA, 21 nt, artificial
  Oligomer
ugacaccucaaauuuaugcca

SEQ ID NO: 14088 - RNA, 21 nt, artificial
  Oligomer
ugacuuguacucaaagccuug

SEQ ID NO: 14089 - RNA, 21 nt, artificial
  Oligomer
guagauguggaaagugggcag

SEQ ID NO: 14090 - RNA, 21 nt, artificial
  Oligomer
gaugaugagcagggcauagag

SEQ ID NO: 14091 - RNA, 21 nt, artificial
  Oligomer
auagagcaggauguagaggug

SEQ ID NO: 14092 - RNA, 21 nt, artificial
  Oligomer
agaaccaccaauagaacuucu

SEQ ID NO: 14093 - RNA, 21 nt, artificial
  Oligomer
agauauaagagaacaugaagg

SEQ ID NO: 14094 - RNA, 21 nt, artificial
  Oligomer
cucuaauaccauuuccaccuc

SEQ ID NO: 14095 - RNA, 21 nt, artificial
  Oligomer
augaagugaaaauccucccau

SEQ ID NO: 14096 - RNA, 21 nt, artificial
  Oligomer
gaagugaaaauccucccaugu

SEQ ID NO: 14097 - RNA, 21 nt, artificial
  Oligomer
gugaaaauccucccaugucag

SEQ ID NO: 14098 - RNA, 21 nt, artificial
  Oligomer
auucucauccaggucauacau

SEQ ID NO: 14099 - RNA, 21 nt, artificial
  Oligomer
uaaacauuagacgggacuuau

SEQ ID NO: 14100 - RNA, 21 nt, artificial
  Oligomer
uuccucuucagaacuaaacag

SEQ ID NO: 14101 - RNA, 21 nt, artificial
  Oligomer
uggaugaugaugggacugcuc

SEQ ID NO: 14102 - RNA, 21 nt, artificial
  Oligomer
uuggcugcuuccuucuucacg

SEQ ID NO: 14103 - RNA, 21 nt, artificial
  Oligomer
uuuguagcuucuuguguucuc

SEQ ID NO: 14104 - RNA, 21 nt, artificial
  Oligomer
agggugguauuucggaugucu

SEQ ID NO: 14105 - RNA, 21 nt, artificial
  Oligomer
aaacauucuaugucuugaccu

SEQ ID NO: 14106 - RNA, 21 nt, artificial
  Oligomer
uuuuaggaaagagcccgauga

SEQ ID NO: 14107 - RNA, 21 nt, artificial
  Oligomer
auguuucagccuggcucuugc

SEQ ID NO: 14108 - RNA, 21 nt, artificial
  Oligomer
aucgaguacugaauaucuggc

SEQ ID NO: 14109 - RNA, 21 nt, artificial
  Oligomer
caucaagaauaucagggcugg

SEQ ID NO: 14110 - RNA, 21 nt, artificial
  Oligomer
gcacuauuguaccuuuucacc

SEQ ID NO: 14111 - RNA, 21 nt, artificial
  Oligomer
gaguggucuuuaucuucuuug

SEQ ID NO: 14112 - RNA, 21 nt, artificial
  Oligomer
uggacuuauaaucaucaugca

SEQ ID NO: 14113 - RNA, 21 nt, artificial
  Oligomer
acuuauaaucaucaugcacug

SEQ ID NO: 14114 - RNA, 21 nt, artificial
  Oligomer
ugacaggccuucucuacauuc

SEQ ID NO: 14115 - RNA, 21 nt, artificial
  Oligomer
agcugggugacauaaaugugc

SEQ ID NO: 14116 - RNA, 21 nt, artificial
  Oligomer
gacaccucaaauuuaugccac

SEQ ID NO: 14117 - RNA, 21 nt, artificial
  Oligomer
gacuuguacucaaagccuugg

SEQ ID NO: 14118 - RNA, 21 nt, artificial
  Oligomer
caccuccauagaugauugccg

SEQ ID NO: 14119 - RNA, 21 nt, artificial
  Oligomer
gcgaagacauacaugauggcc

SEQ ID NO: 14120 - RNA, 21 nt, artificial
  Oligomer
gaagacauacaugauggccag

SEQ ID NO: 14121 - RNA, 21 nt, artificial
  Oligomer
aagcacaccugucauaccugg

SEQ ID NO: 14122 - RNA, 21 nt, artificial
  Oligomer
acauagcgguugaggaaaguc

SEQ ID NO: 14123 - RNA, 21 nt, artificial
  Oligomer
gaagguuaugagguugcggca

SEQ ID NO: 14124 - RNA, 21 nt, artificial
  Oligomer
aaaauccucccaugucagcuc

SEQ ID NO: 14125 - RNA, 21 nt, artificial
  Oligomer
aauccucccaugucagcuccu

SEQ ID NO: 14126 - RNA, 21 nt, artificial
  Oligomer
caugguaaacauuagacggga

SEQ ID NO: 14127 - RNA, 21 nt, artificial
  Oligomer
agcagcuggaugaugauggga

SEQ ID NO: 14128 - RNA, 21 nt, artificial
  Oligomer
aagaagucaagcacagucagg

SEQ ID NO: 14129 - RNA, 21 nt, artificial
  Oligomer
cuuaaaaucuuugcuucugug

SEQ ID NO: 14130 - RNA, 21 nt, artificial
  Oligomer
uacuucuugccuucacccuca

SEQ ID NO: 14131 - RNA, 21 nt, artificial
  Oligomer
guuaaagagcugaguauggag

SEQ ID NO: 14132 - RNA, 21 nt, artificial
  Oligomer
aucuuuguuuccuggugcccu

SEQ ID NO: 14133 - RNA, 21 nt, artificial
  Oligomer
augucaguccaagcaaauacc

SEQ ID NO: 14134 - RNA, 21 nt, artificial
  Oligomer
aagcacuauuguaccuuuuca

SEQ ID NO: 14135 - RNA, 21 nt, artificial
  Oligomer
agcacuauuguaccuuuucac

SEQ ID NO: 14136 - RNA, 21 nt, artificial
  Oligomer
uuguaccuuuucaccuccaca

SEQ ID NO: 14137 - RNA, 21 nt, artificial
  Oligomer
uuauaaucaucaugcacugca

SEQ ID NO: 14138 - RNA, 21 nt, artificial
  Oligomer
aauuguagaacauagucuccu

SEQ ID NO: 14139 - RNA, 21 nt, artificial
  Oligomer
ucuccugccuuuucucauuug

SEQ ID NO: 14140 - RNA, 21 nt, artificial
  Oligomer
cuccugccuuuucucauuugu

SEQ ID NO: 14141 - RNA, 21 nt, artificial
  Oligomer
uaggugcacagaagagaaggc

SEQ ID NO: 14142 - RNA, 21 nt, artificial
  Oligomer
cagcugggugacauaaaugug

SEQ ID NO: 14143 - RNA, 21 nt, artificial
  Oligomer
uuugaggauggaggcaaaggg

SEQ ID NO: 14144 - RNA, 21 nt, artificial
  Oligomer
accucaaauuuaugccacucc

SEQ ID NO: 14145 - RNA, 21 nt, artificial
  Oligomer
agauguggaaagugggcagcu

SEQ ID NO: 14146 - RNA, 21 nt, artificial
  Oligomer
aagguuaugagguugcggcac

SEQ ID NO: 14147 - RNA, 21 nt, artificial
  Oligomer
cauaguaguaagcacgaucug

SEQ ID NO: 14148 - RNA, 21 nt, artificial
  Oligomer
ucuucagaacuaaacagcagc

SEQ ID NO: 14149 - RNA, 21 nt, artificial
  Oligomer
acuaaacagcagcaccagguc

SEQ ID NO: 14150 - RNA, 21 nt, artificial
  Oligomer
agcuggaugaugaugggacug

SEQ ID NO: 14151 - RNA, 21 nt, artificial
  Oligomer
uuccuucuucacgcucucuuu

SEQ ID NO: 14152 - RNA, 21 nt, artificial
  Oligomer
cuuuccucuuaaaaucuuugc

SEQ ID NO: 14153 - RNA, 21 nt, artificial
  Oligomer
aaugacagcuggcauuucuca

SEQ ID NO: 14154 - RNA, 21 nt, artificial
  Oligomer
uuaaagagcugaguauggagg

SEQ ID NO: 14155 - RNA, 21 nt, artificial
  Oligomer
gugacaucaagaauaucaggg

SEQ ID NO: 14156 - RNA, 21 nt, artificial
  Oligomer
gacaucaagaauaucagggcu

SEQ ID NO: 14157 - RNA, 21 nt, artificial
  Oligomer
auaccaaagcaacgcaucgau

SEQ ID NO: 14158 - RNA, 21 nt, artificial
  Oligomer
ugcaauuguagaacauagucu

SEQ ID NO: 14159 - RNA, 21 nt, artificial
  Oligomer
cuaagguggauucugauggag

SEQ ID NO: 14160 - RNA, 21 nt, artificial
  Oligomer
gcucagaaguucucauagugg

SEQ ID NO: 14161 - RNA, 21 nt, artificial
  Oligomer
aaguucucauaguggugcaug

SEQ ID NO: 14162 - RNA, 21 nt, artificial
  Oligomer
gucggaaagaacaugguagcc

SEQ ID NO: 14163 - RNA, 21 nt, artificial
  Oligomer
ggcgaagacauacaugauggc

SEQ ID NO: 14164 - RNA, 21 nt, artificial
  Oligomer
gacccaucauucacaaagacg

SEQ ID NO: 14165 - RNA, 21 nt, artificial
  Oligomer
gugggcugacugagaagaugu

SEQ ID NO: 14166 - RNA, 21 nt, artificial
  Oligomer
gaagauguagacauugacugc

SEQ ID NO: 14167 - RNA, 21 nt, artificial
  Oligomer
gcaggaagguuaugagguugc

SEQ ID NO: 14168 - RNA, 21 nt, artificial
  Oligomer
gcaagauauaagagaacauga

SEQ ID NO: 14169 - RNA, 21 nt, artificial
  Oligomer
uauaagagaacaugaaggaga

SEQ ID NO: 14170 - RNA, 21 nt, artificial
  Oligomer
uuuugccaaaccucuucuuca

SEQ ID NO: 14171 - RNA, 21 nt, artificial
  Oligomer
aacagcagcaccaggucauac

SEQ ID NO: 14172 - RNA, 21 nt, artificial
  Oligomer
uucaaagaagucaagcacagu

SEQ ID NO: 14173 - RNA, 21 nt, artificial
  Oligomer
caaagaagucaagcacaguca

SEQ ID NO: 14174 - RNA, 21 nt, artificial
  Oligomer
agucuguacgggagaauuugc

SEQ ID NO: 14175 - RNA, 21 nt, artificial
  Oligomer
uuguccuccaacuccgaaauc

SEQ ID NO: 14176 - RNA, 21 nt, artificial
  Oligomer
uccuccaacuccgaaaucugg

SEQ ID NO: 14177 - RNA, 21 nt, artificial
  Oligomer
ucugugcucuacuucuugccu

SEQ ID NO: 14178 - RNA, 21 nt, artificial
  Oligomer
guaggaccaaaacuggauuug

SEQ ID NO: 14179 - RNA, 21 nt, artificial
  Oligomer
uuacagcucagcuuuuuagga

SEQ ID NO: 14180 - RNA, 21 nt, artificial
  Oligomer
uuuuggagcuggagggaauag

SEQ ID NO: 14181 - RNA, 21 nt, artificial
  Oligomer
uccagguucuaagcaucacag

SEQ ID NO: 14182 - RNA, 21 nt, artificial
  Oligomer
ugucaguccaagcaaauacca

SEQ ID NO: 14183 - RNA, 21 nt, artificial
  Oligomer
aauaccaaagcaacgcaucga

SEQ ID NO: 14184 - RNA, 21 nt, artificial
  Oligomer
caagcacuauuguaccuuuuc

SEQ ID NO: 14185 - RNA, 21 nt, artificial
  Oligomer
ucuugccuucacccucacucu

SEQ ID NO: 14186 - RNA, 21 nt, artificial
  Oligomer
auagucuccugccuuuucuca

SEQ ID NO: 14187 - RNA, 21 nt, artificial
  Oligomer
uaauugucugggucaauauuc

SEQ ID NO: 14188 - RNA, 21 nt, artificial
  Oligomer
aggugcacagaagagaaggca

SEQ ID NO: 14189 - RNA, 21 nt, artificial
  Oligomer
acagaagagaaggcaggauac

SEQ ID NO: 14190 - RNA, 21 nt, artificial
  Oligomer
ucagaaguucucauaguggug

SEQ ID NO: 14191 - RNA, 21 nt, artificial
  Oligomer
cagaaguucucauaguggugc

SEQ ID NO: 14192 - RNA, 21 nt, artificial
  Oligomer
auguucugguagguggcgaug

SEQ ID NO: 14193 - RNA, 21 nt, artificial
  Oligomer
gaaccaccaauagaacuucug

SEQ ID NO: 14194 - RNA, 21 nt, artificial
  Oligomer
aaaaggcacauagcgguugag

SEQ ID NO: 14195 - RNA, 21 nt, artificial
  Oligomer
agauugccacacacacgaugu

SEQ ID NO: 14196 - RNA, 21 nt, artificial
  Oligomer
guagcuucuuguguucucggc

SEQ ID NO: 14197 - RNA, 21 nt, artificial
  Oligomer
uuaugccagacaaagacauug

SEQ ID NO: 14198 - RNA, 21 nt, artificial
  Oligomer
caaacuggucgaggacaaugg

SEQ ID NO: 14199 - RNA, 21 nt, artificial
  Oligomer
uagucuguacgggagaauuug

SEQ ID NO: 14200 - RNA, 21 nt, artificial
  Oligomer
cuucugugcucuacuucuugc

SEQ ID NO: 14201 - RNA, 21 nt, artificial
  Oligomer
gaaacauucuaugucuugacc

SEQ ID NO: 14202 - RNA, 21 nt, artificial
  Oligomer
uuuuacagcucagcuuuuuag

SEQ ID NO: 14203 - RNA, 21 nt, artificial
  Oligomer
acaucaagaauaucagggcug

SEQ ID NO: 14204 - RNA, 21 nt, artificial
  Oligomer
ucagaggccaccacaaauucc

SEQ ID NO: 14205 - RNA, 21 nt, artificial
  Oligomer
ugcccuccucaaaguugcuga

SEQ ID NO: 14206 - RNA, 21 nt, artificial
  Oligomer
cuguccagguucuaagcauca

SEQ ID NO: 14207 - RNA, 21 nt, artificial
  Oligomer
uccuccucccucaaaugucag

SEQ ID NO: 14208 - RNA, 21 nt, artificial
  Oligomer
aguccaagcaaauaccaaagc

SEQ ID NO: 14209 - RNA, 21 nt, artificial
  Oligomer
aacauagucuccugccuuuuc

SEQ ID NO: 14210 - RNA, 21 nt, artificial
  Oligomer
agaaguucucauaguggugca

SEQ ID NO: 14211 - RNA, 21 nt, artificial
  Oligomer
acuccgguucagcacuuucug

SEQ ID NO: 14212 - RNA, 21 nt, artificial
  Oligomer
augaugucagccagccacuca

SEQ ID NO: 14213 - RNA, 21 nt, artificial
  Oligomer
ugggaggcgaagacauacaug

SEQ ID NO: 14214 - RNA, 21 nt, artificial
  Oligomer
cugcacucucaccuuucucuc

SEQ ID NO: 14215 - RNA, 21 nt, artificial
  Oligomer
agaacaugaaggagacgcugg

SEQ ID NO: 14216 - RNA, 21 nt, artificial
  Oligomer
aucuucucuugcagcgccucu

SEQ ID NO: 14217 - RNA, 21 nt, artificial
  Oligomer
uuugccaaaccucuucuucag

SEQ ID NO: 14218 - RNA, 21 nt, artificial
  Oligomer
uugccaaaccucuucuucagu

SEQ ID NO: 14219 - RNA, 21 nt, artificial
  Oligomer
uaccauuuccaccuccaccuc

SEQ ID NO: 14220 - RNA, 21 nt, artificial
  Oligomer
uucagaugucuucuuuccucu

SEQ ID NO: 14221 - RNA, 21 nt, artificial
  Oligomer
aaggcagcagagagcaaugau

SEQ ID NO: 14222 - RNA, 21 nt, artificial
  Oligomer
agacaaagacauugggcugca

SEQ ID NO: 14223 - RNA, 21 nt, artificial
  Oligomer
acaaagacauugggcugcagg

SEQ ID NO: 14224 - RNA, 21 nt, artificial
  Oligomer
aacauucuaugucuugaccug

SEQ ID NO: 14225 - RNA, 21 nt, artificial
  Oligomer
cuccucccucaaaugucaguc

SEQ ID NO: 14226 - RNA, 21 nt, artificial
  Oligomer
aaugucaguccaagcaaauac

SEQ ID NO: 14227 - RNA, 21 nt, artificial
  Oligomer
uuuaucuucuuugggagaucc

SEQ ID NO: 14228 - RNA, 21 nt, artificial
  Oligomer
cauaguggugcaugaaguggg

SEQ ID NO: 14229 - RNA, 21 nt, artificial
  Oligomer
cuccaaacgguccaucaaggu

SEQ ID NO: 14230 - RNA, 21 nt, artificial
  Oligomer
gaagcacaccugucauaccug

SEQ ID NO: 14231 - RNA, 21 nt, artificial
  Oligomer
acagauggccgagaagauugc

SEQ ID NO: 14232 - RNA, 21 nt, artificial
  Oligomer
gagccuuucaugaagaccacc

SEQ ID NO: 14233 - RNA, 21 nt, artificial
  Oligomer
ucauacuccuuagggaucuug

SEQ ID NO: 14234 - RNA, 21 nt, artificial
  Oligomer
uuuaugccagacaaagacauu

SEQ ID NO: 14235 - RNA, 21 nt, artificial
  Oligomer
gacaaagacauugggcugcag

SEQ ID NO: 14236 - RNA, 21 nt, artificial
  Oligomer
uucaaccacuauguuguccuc

SEQ ID NO: 14237 - RNA, 21 nt, artificial
  Oligomer
auuuaguaggaccaaaacugg

SEQ ID NO: 14238 - RNA, 21 nt, artificial
  Oligomer
acaucagugguugcuucuagg

SEQ ID NO: 14239 - RNA, 21 nt, artificial
  Oligomer
caucagugguugcuucuagga

SEQ ID NO: 14240 - RNA, 21 nt, artificial
  Oligomer
cucagaggccaccacaaauuc

SEQ ID NO: 14241 - RNA, 21 nt, artificial
  Oligomer
uagaacauagucuccugccuu

SEQ ID NO: 14242 - RNA, 21 nt, artificial
  Oligomer
cauagucuccugccuuuucuc

SEQ ID NO: 14243 - RNA, 21 nt, artificial
  Oligomer
agaaggcaggauacuggaagc

SEQ ID NO: 14244 - RNA, 21 nt, artificial
  Oligomer
caggcucagaaguucucauag

SEQ ID NO: 14245 - RNA, 21 nt, artificial
  Oligomer
agacuccgguucagcacuuuc

SEQ ID NO: 14246 - RNA, 21 nt, artificial
  Oligomer
gacauaaaugugcacagacac

SEQ ID NO: 14247 - RNA, 21 nt, artificial
  Oligomer
gccaaaccucuucuucagucc

SEQ ID NO: 14248 - RNA, 21 nt, artificial
  Oligomer
aucuucaaccacuauguuguc

SEQ ID NO: 14249 - RNA, 21 nt, artificial
  Oligomer
aaguagggcugcuccuuuugg

SEQ ID NO: 14250 - RNA, 21 nt, artificial
  Oligomer
auguagacauugacugcgugg

SEQ ID NO: 14251 - RNA, 21 nt, artificial
  Oligomer
aauaccauuuccaccuccacc

SEQ ID NO: 14252 - RNA, 21 nt, artificial
  Oligomer
aucuuugcuucugugcucuac

SEQ ID NO: 14253 - RNA, 21 nt, artificial
  Oligomer
uugucugggucaauauucucc

SEQ ID NO: 14254 - RNA, 21 nt, artificial
  Oligomer
gaaggcaggauacuggaagca

SEQ ID NO: 14255 - RNA, 21 nt, artificial
  Oligomer
cacuguccugacuuguacuca

SEQ ID NO: 14256 - RNA, 21 nt, artificial
  Oligomer
aucauggugaagaauucgucc

SEQ ID NO: 14257 - RNA, 21 nt, artificial
  Oligomer
agacucacuaagggaaggcag

SEQ ID NO: 14258 - RNA, 21 nt, artificial
  Oligomer
ugugagcugcuuagguugagg

SEQ ID NO: 14259 - RNA, 21 nt, artificial
  Oligomer
ucuucaaccacuauguugucc

SEQ ID NO: 14260 - RNA, 21 nt, artificial
  Oligomer
ucaaccacuauguuguccucc

SEQ ID NO: 14261 - RNA, 21 nt, artificial
  Oligomer
cucuacuucuugccuucaccc

SEQ ID NO: 14262 - RNA, 21 nt, artificial
  Oligomer
ucuuugggagauccugacugg

SEQ ID NO: 14263 - RNA, 21 nt, artificial
  Oligomer
ugucugggucaauauucuccc

SEQ ID NO: 14264 - RNA, 21 nt, artificial
  Oligomer
augaacgagacucgacagcug

SEQ ID NO: 14265 - RNA, 21 nt, artificial
  Oligomer
auccagucagaagagcuccca

SEQ ID NO: 14266 - RNA, 21 nt, artificial
  Oligomer
augucuucaaucuccuucuug

SEQ ID NO: 14267 - RNA, 21 nt, artificial
  Oligomer
uaggaccaaaacuggauuugg

SEQ ID NO: 14268 - RNA, 21 nt, artificial
  Oligomer
augguagagaagaacugcuca

SEQ ID NO: 14269 - RNA, 21 nt, artificial
  Oligomer
aagagcccgaugaaaaaggaa

SEQ ID NO: 14270 - RNA, 21 nt, artificial
  Oligomer
uuaucuucuuugggagauccu

SEQ ID NO: 14271 - RNA, 21 nt, artificial
  Oligomer
aagauguagacauugacugcg

SEQ ID NO: 14272 - RNA, 21 nt, artificial
  Oligomer
uguacugcugcagcuuuuggg

SEQ ID NO: 14273 - RNA, 21 nt, artificial
  Oligomer
gaugaacgagacucgacagcu

SEQ ID NO: 14274 - RNA, 21 nt, artificial
  Oligomer
aacauagacuccaccaccucg

SEQ ID NO: 14275 - RNA, 21 nt, artificial
  Oligomer
uucagaacuaaacagcagcac

SEQ ID NO: 14276 - RNA, 21 nt, artificial
  Oligomer
uucucaaaccaguagcgguca

SEQ ID NO: 14277 - RNA, 21 nt, artificial
  Oligomer
uugaaaacccuuguucaggac

SEQ ID NO: 14278 - RNA, 21 nt, artificial
  Oligomer
uuuuuaggaaagagcccgaug

SEQ ID NO: 14279 - RNA, 21 nt, artificial
  Oligomer
aaagagcccgaugaaaaagga

SEQ ID NO: 14280 - RNA, 21 nt, artificial
  Oligomer
ucuaagcaucacagcuucugc

SEQ ID NO: 14281 - RNA, 21 nt, artificial
  Oligomer
gauuuuguggaagucaauuag

SEQ ID NO: 14282 - RNA, 21 nt, artificial
  Oligomer
aauugucugggucaauauucu

SEQ ID NO: 14283 - RNA, 21 nt, artificial
  Oligomer
uuacacagcauuuggcugccc

SEQ ID NO: 14284 - RNA, 21 nt, artificial
  Oligomer
auggugaagaauucguccuug

SEQ ID NO: 14285 - RNA, 21 nt, artificial
  Oligomer
cuucaaccacuauguuguccu

SEQ ID NO: 14286 - RNA, 21 nt, artificial
  Oligomer
aagaaaaguuaaagagcugag

SEQ ID NO: 14287 - RNA, 21 nt, artificial
  Oligomer
uuggagcuggagggaauagac

SEQ ID NO: 14288 - RNA, 21 nt, artificial
  Oligomer
aaaggacgguauccuguauac

SEQ ID NO: 14289 - RNA, 21 nt, artificial
  Oligomer
uacauucuuggucauuccugg

SEQ ID NO: 14290 - RNA, 21 nt, artificial
  Oligomer
uauagcauggugguccugagg

SEQ ID NO: 14291 - RNA, 21 nt, artificial
  Oligomer
aagcacgaucugcaaacacgc

SEQ ID NO: 14292 - RNA, 21 nt, artificial
  Oligomer
uuucucucuggguccuugguc

SEQ ID NO: 14293 - RNA, 21 nt, artificial
  Oligomer
uuaaaccagccgucauagcgc

SEQ ID NO: 14294 - RNA, 21 nt, artificial
  Oligomer
agccauugccauccuugucag

SEQ ID NO: 14295 - RNA, 21 nt, artificial
  Oligomer
ugguguuggguucagaugucu

SEQ ID NO: 14296 - RNA, 21 nt, artificial
  Oligomer
aagcagacucacuaagggaag

SEQ ID NO: 14297 - RNA, 21 nt, artificial
  Oligomer
uucuuggagaacagcccauuc

SEQ ID NO: 14298 - RNA, 21 nt, artificial
  Oligomer
guguucucaaaccaguagcgg

SEQ ID NO: 14299 - RNA, 21 nt, artificial
  Oligomer
uuaggguugagaucacuccag

SEQ ID NO: 14300 - RNA, 21 nt, artificial
  Oligomer
acuauguuguccuccaacucc

SEQ ID NO: 14301 - RNA, 21 nt, artificial
  Oligomer
uauguuguccuccaacuccga

SEQ ID NO: 14302 - RNA, 21 nt, artificial
  Oligomer
gugcucuacuucuugccuuca

SEQ ID NO: 14303 - RNA, 21 nt, artificial
  Oligomer
auuugguagaaaucacaucag

SEQ ID NO: 14304 - RNA, 21 nt, artificial
  Oligomer
uuuaggaaagagcccgaugaa

SEQ ID NO: 14305 - RNA, 21 nt, artificial
  Oligomer
augcacugcaauuguagaaca

SEQ ID NO: 14306 - RNA, 21 nt, artificial
  Oligomer
auacuccgggaguguuuucug

SEQ ID NO: 14307 - RNA, 21 nt, artificial
  Oligomer
uacuccgggaguguuuucugc

SEQ ID NO: 14308 - RNA, 21 nt, artificial
  Oligomer
uaagguggauucugauggaga

SEQ ID NO: 14309 - RNA, 21 nt, artificial
  Oligomer
aagaacaugguagccaaagaa

SEQ ID NO: 14310 - RNA, 21 nt, artificial
  Oligomer
aaaggcacauagcgguugagg

SEQ ID NO: 14311 - RNA, 21 nt, artificial
  Oligomer
uugaggaaagucucucgcagg

SEQ ID NO: 14312 - RNA, 21 nt, artificial
  Oligomer
aaacacgccaacacagauggc

SEQ ID NO: 14313 - RNA, 21 nt, artificial
  Oligomer
aaaccucuucuucaguccagg

SEQ ID NO: 14314 - RNA, 21 nt, artificial
  Oligomer
uuggagaggaagccauucuca

SEQ ID NO: 14315 - RNA, 21 nt, artificial
  Oligomer
auuagacgggacuuauccucu

SEQ ID NO: 14316 - RNA, 21 nt, artificial
  Oligomer
augaagaccaccaggaugucc

SEQ ID NO: 14317 - RNA, 21 nt, artificial
  Oligomer
uagccauugccauccuuguca

SEQ ID NO: 14318 - RNA, 21 nt, artificial
  Oligomer
cuucagaacuaaacagcagca

SEQ ID NO: 14319 - RNA, 21 nt, artificial
  Oligomer
acuccaucuuuggcugcuucc

SEQ ID NO: 14320 - RNA, 21 nt, artificial
  Oligomer
aaauaggccaccacuccagag

SEQ ID NO: 14321 - RNA, 21 nt, artificial
  Oligomer
gagagcaaugauggugauggc

SEQ ID NO: 14322 - RNA, 21 nt, artificial
  Oligomer
aauguugauaacagcgaccag

SEQ ID NO: 14323 - RNA, 21 nt, artificial
  Oligomer
auuaggguugagaucacucca

SEQ ID NO: 14324 - RNA, 21 nt, artificial
  Oligomer
uaggguugagaucacuccagu

SEQ ID NO: 14325 - RNA, 21 nt, artificial
  Oligomer
aaacccuuguucaggaccuuc

SEQ ID NO: 14326 - RNA, 21 nt, artificial
  Oligomer
accaugguagagaagaacugc

SEQ ID NO: 14327 - RNA, 21 nt, artificial
  Oligomer
aguacugaauaucuggcagag

SEQ ID NO: 14328 - RNA, 21 nt, artificial
  Oligomer
aagcaacgcaucgauuuugug

SEQ ID NO: 14329 - RNA, 21 nt, artificial
  Oligomer
uaucggagacaagcacuauug

SEQ ID NO: 14330 - RNA, 21 nt, artificial
  Oligomer
aucggagacaagcacuauugu

SEQ ID NO: 14331 - RNA, 21 nt, artificial
  Oligomer
gacgguauccuguauacuccg

SEQ ID NO: 14332 - RNA, 21 nt, artificial
  Oligomer
uauccuguauacuccgggagu

SEQ ID NO: 14333 - RNA, 21 nt, artificial
  Oligomer
gucugggucaauauucuccca

SEQ ID NO: 14334 - RNA, 21 nt, artificial
  Oligomer
aagagaaggcaggauacugga

SEQ ID NO: 14335 - RNA, 21 nt, artificial
  Oligomer
caccucuuggaugaugucagc

SEQ ID NO: 14336 - RNA, 21 nt, artificial
  Oligomer
gucaccuccauagaugauugc

SEQ ID NO: 14337 - RNA, 21 nt, artificial
  Oligomer
aucagagcauagcugccaugg

SEQ ID NO: 14338 - RNA, 21 nt, artificial
  Oligomer
aaccaccaauagaacuucugg

SEQ ID NO: 14339 - RNA, 21 nt, artificial
  Oligomer
agauguagacauugacugcgu

SEQ ID NO: 14340 - RNA, 21 nt, artificial
  Oligomer
auugccacacacacgaugugc

SEQ ID NO: 14341 - RNA, 21 nt, artificial
  Oligomer
uucuccacgaagcgcuuguac

SEQ ID NO: 14342 - RNA, 21 nt, artificial
  Oligomer
cugcuuugucacagccuuccu

SEQ ID NO: 14343 - RNA, 21 nt, artificial
  Oligomer
ucagaacuaaacagcagcacc

SEQ ID NO: 14344 - RNA, 21 nt, artificial
  Oligomer
agaacuaaacagcagcaccag

SEQ ID NO: 14345 - RNA, 21 nt, artificial
  Oligomer
aaaucuuugcuucugugcucu

SEQ ID NO: 14346 - RNA, 21 nt, artificial
  Oligomer
uuugcuucugugcucuacuuc

SEQ ID NO: 14347 - RNA, 21 nt, artificial
  Oligomer
cacuauguuguccuccaacuc

SEQ ID NO: 14348 - RNA, 21 nt, artificial
  Oligomer
ugaaaacccuuguucaggacc

SEQ ID NO: 14349 - RNA, 21 nt, artificial
  Oligomer
aacccuuguucaggaccuucc

SEQ ID NO: 14350 - RNA, 21 nt, artificial
  Oligomer
aaaguuaaagagcugaguaug

SEQ ID NO: 14351 - RNA, 21 nt, artificial
  Oligomer
aauaucuggcagagaggcugg

SEQ ID NO: 14352 - RNA, 21 nt, artificial
  Oligomer
guucuaagcaucacagcuucu

SEQ ID NO: 14353 - RNA, 21 nt, artificial
  Oligomer
aacgcaucgauuuuguggaag

SEQ ID NO: 14354 - RNA, 21 nt, artificial
  Oligomer
uucuuugggagauccugacug

SEQ ID NO: 14355 - RNA, 21 nt, artificial
  Oligomer
cuuugggagauccugacuggu

SEQ ID NO: 14356 - RNA, 21 nt, artificial
  Oligomer
gugccguugauaaacaggugg

SEQ ID NO: 14357 - RNA, 21 nt, artificial
  Oligomer
aaucaucaugcacugcaauug

SEQ ID NO: 14358 - RNA, 21 nt, artificial
  Oligomer
uuguagaacauagucuccugc

SEQ ID NO: 14359 - RNA, 21 nt, artificial
  Oligomer
acuccgggaguguuuucugca

SEQ ID NO: 14360 - RNA, 21 nt, artificial
  Oligomer
auauucucccaauauugggag

SEQ ID NO: 14361 - RNA, 21 nt, artificial
  Oligomer
aaggcaggauacuggaagcag

SEQ ID NO: 14362 - RNA, 21 nt, artificial
  Oligomer
uucuuggucauuccuggaggg

SEQ ID NO: 14363 - RNA, 21 nt, artificial
  Oligomer
auguauagcauggugguccug

SEQ ID NO: 14364 - RNA, 21 nt, artificial
  Oligomer
auaaaugugcacagacaccag

SEQ ID NO: 14365 - RNA, 21 nt, artificial
  Oligomer
cucaaauuuaugccacuccug

SEQ ID NO: 14366 - RNA, 21 nt, artificial
  Oligomer
gauguagacauugacugcgug

SEQ ID NO: 14367 - RNA, 21 nt, artificial
  Oligomer
gaacauagacuccaccaccuc

SEQ ID NO: 14368 - RNA, 21 nt, artificial
  Oligomer
uagacgggacuuauccucugg

SEQ ID NO: 14369 - RNA, 21 nt, artificial
  Oligomer
uaaauagcuccuucucgcuca

SEQ ID NO: 14370 - RNA, 21 nt, artificial
  Oligomer
uccuuagggaucuugagcagc

SEQ ID NO: 14371 - RNA, 21 nt, artificial
  Oligomer
uugaguuucuuuuguagcuuc

SEQ ID NO: 14372 - RNA, 21 nt, artificial
  Oligomer
aguugugagcugcuuagguug

SEQ ID NO: 14373 - RNA, 21 nt, artificial
  Oligomer
uugugagcugcuuagguugag

SEQ ID NO: 14374 - RNA, 21 nt, artificial
  Oligomer
ugucuucaaucuccuucuugg

SEQ ID NO: 14375 - RNA, 21 nt, artificial
  Oligomer
auuccugguguucucaaacca

SEQ ID NO: 14376 - RNA, 21 nt, artificial
  Oligomer
uuccugguguucucaaaccag

SEQ ID NO: 14377 - RNA, 21 nt, artificial
  Oligomer
auagguccugguuguacaggg

SEQ ID NO: 14378 - RNA, 21 nt, artificial
  Oligomer
cagcuggcauuucucauguag

SEQ ID NO: 14379 - RNA, 21 nt, artificial
  Oligomer
uuuaguaggaccaaaacugga

SEQ ID NO: 14380 - RNA, 21 nt, artificial
  Oligomer
uggugguaaaacauguacaug

SEQ ID NO: 14381 - RNA, 21 nt, artificial
  Oligomer
cagcuuuuuaggaaagagccc

SEQ ID NO: 14382 - RNA, 21 nt, artificial
  Oligomer
aaguuaaagagcugaguaugg

SEQ ID NO: 14383 - RNA, 21 nt, artificial
  Oligomer
ucaaaguugcugacacuuugg

SEQ ID NO: 14384 - RNA, 21 nt, artificial
  Oligomer
gaaguagggcugcuccuuuug

SEQ ID NO: 14385 - RNA, 21 nt, artificial
  Oligomer
agcaacgcaucgauuuugugg

SEQ ID NO: 14386 - RNA, 21 nt, artificial
  Oligomer
caucaugcacugcaauuguag

SEQ ID NO: 14387 - RNA, 21 nt, artificial
  Oligomer
ucaauauucucccaauauugg

SEQ ID NO: 14388 - RNA, 21 nt, artificial
  Oligomer
uauucucccaauauugggagg

SEQ ID NO: 14389 - RNA, 21 nt, artificial
  Oligomer
auucucccaauauugggaggg

SEQ ID NO: 14390 - RNA, 21 nt, artificial
  Oligomer
uugccuucacccucacucuuc

SEQ ID NO: 14391 - RNA, 21 nt, artificial
  Oligomer
auucuuggucauuccuggagg

SEQ ID NO: 14392 - RNA, 21 nt, artificial
  Oligomer
uucagcacuuucuggaagugc

SEQ ID NO: 14393 - RNA, 21 nt, artificial
  Oligomer
cuuacacagcauuuggcugcc

SEQ ID NO: 14394 - RNA, 21 nt, artificial
  Oligomer
aauuuaugccacuccugaugg

SEQ ID NO: 14395 - RNA, 21 nt, artificial
  Oligomer
augcggauguugaggaacucg

SEQ ID NO: 14396 - RNA, 21 nt, artificial
  Oligomer
accuccauagaugauugccgg

SEQ ID NO: 14397 - RNA, 21 nt, artificial
  Oligomer
aucaaaaggcacauagcgguu

SEQ ID NO: 14398 - RNA, 21 nt, artificial
  Oligomer
guaagcacgaucugcaaacac

SEQ ID NO: 14399 - RNA, 21 nt, artificial
  Oligomer
ugccucagguuguuaaaccag

SEQ ID NO: 14400 - RNA, 21 nt, artificial
  Oligomer
ucagguuguuaaaccagccgu

SEQ ID NO: 14401 - RNA, 21 nt, artificial
  Oligomer
cagguuguuaaaccagccguc

SEQ ID NO: 14402 - RNA, 21 nt, artificial
  Oligomer
ccuuucaugaagaccaccagg

SEQ ID NO: 14403 - RNA, 21 nt, artificial
  Oligomer
aauagcuccuucucgcucauc

SEQ ID NO: 14404 - RNA, 21 nt, artificial
  Oligomer
uacuccuuagggaucuugagc

SEQ ID NO: 14405 - RNA, 21 nt, artificial
  Oligomer
aucgcuggcacuccaucuuug

SEQ ID NO: 14406 - RNA, 21 nt, artificial
  Oligomer
augccagacaaagacauuggg

SEQ ID NO: 14407 - RNA, 21 nt, artificial
  Oligomer
ucaauguugauaacagcgacc

SEQ ID NO: 14408 - RNA, 21 nt, artificial
  Oligomer
uugauaacagcgaccagcacg

SEQ ID NO: 14409 - RNA, 21 nt, artificial
  Oligomer
auuucggaugucuucaaucuc

SEQ ID NO: 14410 - RNA, 21 nt, artificial
  Oligomer
aaaaucuuugcuucugugcuc

SEQ ID NO: 14411 - RNA, 21 nt, artificial
  Oligomer
aaucuccuucuuggagaacag

SEQ ID NO: 14412 - RNA, 21 nt, artificial
  Oligomer
aacuggucgaggacaauggca

SEQ ID NO: 14413 - RNA, 21 nt, artificial
  Oligomer
uugagaucacuccaguuccuu

SEQ ID NO: 14414 - RNA, 21 nt, artificial
  Oligomer
cuauguuguccuccaacuccg

SEQ ID NO: 14415 - RNA, 21 nt, artificial
  Oligomer
uuugguagaaaucacaucagu

SEQ ID NO: 14416 - RNA, 21 nt, artificial
  Oligomer
agaaaaguuaaagagcugagu

SEQ ID NO: 14417 - RNA, 21 nt, artificial
  Oligomer
uucuaagcaucacagcuucug

SEQ ID NO: 14418 - RNA, 21 nt, artificial
  Oligomer
uaagcaucacagcuucugcac

SEQ ID NO: 14419 - RNA, 21 nt, artificial
  Oligomer
uaggaaaggacgguauccugu

SEQ ID NO: 14420 - RNA, 21 nt, artificial
  Oligomer
acgguauccuguauacuccgg

SEQ ID NO: 14421 - RNA, 21 nt, artificial
  Oligomer
uauacuccgggaguguuuucu

SEQ ID NO: 14422 - RNA, 21 nt, artificial
  Oligomer
gucaauauucucccaauauug

SEQ ID NO: 14423 - RNA, 21 nt, artificial
  Oligomer
caauauucucccaauauuggg

SEQ ID NO: 14424 - RNA, 21 nt, artificial
  Oligomer
guguuuucugcaggaagcugg

SEQ ID NO: 14425 - RNA, 21 nt, artificial
  Oligomer
auaguggugcaugaagugggc

SEQ ID NO: 14426 - RNA, 21 nt, artificial
  Oligomer
aaaugugcacagacaccaggu

SEQ ID NO: 14427 - RNA, 21 nt, artificial
  Oligomer
accucuuggaugaugucagcc

SEQ ID NO: 14428 - RNA, 21 nt, artificial
  Oligomer
aaacgguccaucaagguacag

SEQ ID NO: 14429 - RNA, 21 nt, artificial
  Oligomer
acuuguacucaaagccuuggg

SEQ ID NO: 14430 - RNA, 21 nt, artificial
  Oligomer
ugucaccuccauagaugauug

SEQ ID NO: 14431 - RNA, 21 nt, artificial
  Oligomer
auagcgguugaggaaagucuc

SEQ ID NO: 14432 - RNA, 21 nt, artificial
  Oligomer
uaagagaacaugaaggagacg

SEQ ID NO: 14433 - RNA, 21 nt, artificial
  Oligomer
aagagaacaugaaggagacgc

SEQ ID NO: 14434 - RNA, 21 nt, artificial
  Oligomer
auaguaguaagcacgaucugc

SEQ ID NO: 14435 - RNA, 21 nt, artificial
  Oligomer
cgcagcaugaagugaaaaucc

SEQ ID NO: 14436 - RNA, 21 nt, artificial
  Oligomer
aaggaucgcaucauggugaag

SEQ ID NO: 14437 - RNA, 21 nt, artificial
  Oligomer
cgcaucauggugaagaauucg

SEQ ID NO: 14438 - RNA, 21 nt, artificial
  Oligomer
aacauuagacgggacuuaucc

SEQ ID NO: 14439 - RNA, 21 nt, artificial
  Oligomer
accaggucauacuccuuaggg

SEQ ID NO: 14440 - RNA, 21 nt, artificial
  Oligomer
auacuccuuagggaucuugag

SEQ ID NO: 14441 - RNA, 21 nt, artificial
  Oligomer
ugaugaugggacugcuccucu

SEQ ID NO: 14442 - RNA, 21 nt, artificial
  Oligomer
agagagcaaugauggugaugg

SEQ ID NO: 14443 - RNA, 21 nt, artificial
  Oligomer
gucaguugugagcugcuuagg

SEQ ID NO: 14444 - RNA, 21 nt, artificial
  Oligomer
gucaauguugauaacagcgac

SEQ ID NO: 14445 - RNA, 21 nt, artificial
  Oligomer
ucuuggagaacagcccauucc

SEQ ID NO: 14446 - RNA, 21 nt, artificial
  Oligomer
cauuaggguugagaucacucc

SEQ ID NO: 14447 - RNA, 21 nt, artificial
  Oligomer
agaucacuccaguuccuuggg

SEQ ID NO: 14448 - RNA, 21 nt, artificial
  Oligomer
uugggagcuuugaaaacccuu

SEQ ID NO: 14449 - RNA, 21 nt, artificial
  Oligomer
agaaaucacaucagugguugc

SEQ ID NO: 14450 - RNA, 21 nt, artificial
  Oligomer
uucuaugucuugaccugggug

SEQ ID NO: 14451 - RNA, 19 nt, artificial
  Oligomer
cgacgaucacuggcuucuu

SEQ ID NO: 14452 - RNA, 19 nt, artificial
  Oligomer
gcguguuggaaacgucaga

SEQ ID NO: 14453 - RNA, 19 nt, artificial
  Oligomer
ccaaacguuugccuucucu

SEQ ID NO: 14454 - RNA, 19 nt, artificial
  Oligomer
cagaucaagaggcuccaaa

SEQ ID NO: 14455 - RNA, 19 nt, artificial
  Oligomer
gcagaucaagaggcuccaa

SEQ ID NO: 14456 - RNA, 19 nt, artificial
  Oligomer
ugcuguuccucugaguaaa

SEQ ID NO: 14457 - RNA, 19 nt, artificial
  Oligomer
gcuguuggaaaccuauucu

SEQ ID NO: 14458 - RNA, 19 nt, artificial
  Oligomer
ggaguugggacgaauucag

SEQ ID NO: 14459 - RNA, 19 nt, artificial
  Oligomer
uccaaacguuugccuucuc

SEQ ID NO: 14460 - RNA, 19 nt, artificial
  Oligomer
cuccaaacguuugccuucu

SEQ ID NO: 14461 - RNA, 19 nt, artificial
  Oligomer
agcuguuggaaaccuauuc

SEQ ID NO: 14462 - RNA, 19 nt, artificial
  Oligomer
cgaauucaggcagcucaag

SEQ ID NO: 14463 - RNA, 19 nt, artificial
  Oligomer
acgaauucaggcagcucaa

SEQ ID NO: 14464 - RNA, 19 nt, artificial
  Oligomer
caagaaagcugcaaaggac

SEQ ID NO: 14465 - RNA, 19 nt, artificial
  Oligomer
cguguuggaaacgucagac

SEQ ID NO: 14466 - RNA, 19 nt, artificial
  Oligomer
cuguuggaaaccuauucuc

SEQ ID NO: 14467 - RNA, 19 nt, artificial
  Oligomer
gacgaauucaggcagcuca

SEQ ID NO: 14468 - RNA, 19 nt, artificial
  Oligomer
gcuguuccucugaguaaag

SEQ ID NO: 14469 - RNA, 19 nt, artificial
  Oligomer
uggugcagaucaagaggcu

SEQ ID NO: 14470 - RNA, 19 nt, artificial
  Oligomer
uugagguguugccaggauu

SEQ ID NO: 14471 - RNA, 19 nt, artificial
  Oligomer
gcagcuguuggaaaccuau

SEQ ID NO: 14472 - RNA, 19 nt, artificial
  Oligomer
ccucgcccauuucaggaau

SEQ ID NO: 14473 - RNA, 19 nt, artificial
  Oligomer
gccauuugcuguuccucug

SEQ ID NO: 14474 - RNA, 19 nt, artificial
  Oligomer
ucaagacccucaaggagac

SEQ ID NO: 14475 - RNA, 19 nt, artificial
  Oligomer
ccauuugcuguuccucuga

SEQ ID NO: 14476 - RNA, 19 nt, artificial
  Oligomer
ucgcccauuucaggaaucu

SEQ ID NO: 14477 - RNA, 19 nt, artificial
  Oligomer
cucgcccauuucaggaauc

SEQ ID NO: 14478 - RNA, 19 nt, artificial
  Oligomer
agcuucucgaugcaccacu

SEQ ID NO: 14479 - RNA, 19 nt, artificial
  Oligomer
auacccaguuucagugcaa

SEQ ID NO: 14480 - RNA, 19 nt, artificial
  Oligomer
ccgauacccaguuucagug

SEQ ID NO: 14481 - RNA, 19 nt, artificial
  Oligomer
aggaaucugcagccuggaa

SEQ ID NO: 14482 - RNA, 19 nt, artificial
  Oligomer
cgcccauuucaggaaucug

SEQ ID NO: 14483 - RNA, 19 nt, artificial
  Oligomer
agacccucaaggagaccuu

SEQ ID NO: 14484 - RNA, 19 nt, artificial
  Oligomer
ccauuucaggaaucugcag

SEQ ID NO: 14485 - RNA, 19 nt, artificial
  Oligomer
cccauuucaggaaucugca

SEQ ID NO: 14486 - RNA, 19 nt, artificial
  Oligomer
acagcaagaaagcugcaaa

SEQ ID NO: 14487 - RNA, 19 nt, artificial
  Oligomer
cccgauacccaguuucagu

SEQ ID NO: 14488 - RNA, 19 nt, artificial
  Oligomer
uggaaaccuauucucggag

SEQ ID NO: 14489 - RNA, 19 nt, artificial
  Oligomer
uccucgcccauuucaggaa

SEQ ID NO: 14490 - RNA, 19 nt, artificial
  Oligomer
cuugagguguugccaggau

SEQ ID NO: 14491 - RNA, 19 nt, artificial
  Oligomer
gcccauuucaggaaucugc

SEQ ID NO: 14492 - RNA, 19 nt, artificial
  Oligomer
cagcaagaaagcugcaaag

SEQ ID NO: 14493 - RNA, 19 nt, artificial
  Oligomer
ggcuccaaacguuugccuu

SEQ ID NO: 14494 - RNA, 19 nt, artificial
  Oligomer
ugccaggauucuaucccag

SEQ ID NO: 14495 - RNA, 19 nt, artificial
  Oligomer
ggaaaccuauucucggagg

SEQ ID NO: 14496 - RNA, 19 nt, artificial
  Oligomer
cagcuguuggaaaccuauu

SEQ ID NO: 14497 - RNA, 19 nt, artificial
  Oligomer
gacagcaagaaagcugcaa

SEQ ID NO: 14498 - RNA, 19 nt, artificial
  Oligomer
ugcagcuguuggaaaccua

SEQ ID NO: 14499 - RNA, 19 nt, artificial
  Oligomer
aggcuccaaacguuugccu

SEQ ID NO: 14500 - RNA, 19 nt, artificial
  Oligomer
ggacagcaagaaagcugca

SEQ ID NO: 14501 - RNA, 19 nt, artificial
  Oligomer
cugcagcuguuggaaaccu

SEQ ID NO: 14502 - RNA, 19 nt, artificial
  Oligomer
ggccauuugcuguuccucu

SEQ ID NO: 14503 - RNA, 19 nt, artificial
  Oligomer
aagaagccagugaucgucg

SEQ ID NO: 14504 - RNA, 19 nt, artificial
  Oligomer
ucugacguuuccaacacgc

SEQ ID NO: 14505 - RNA, 19 nt, artificial
  Oligomer
agagaaggcaaacguuugg

SEQ ID NO: 14506 - RNA, 19 nt, artificial
  Oligomer
uuuggagccucuugaucug

SEQ ID NO: 14507 - RNA, 19 nt, artificial
  Oligomer
uuggagccucuugaucugc

SEQ ID NO: 14508 - RNA, 19 nt, artificial
  Oligomer
uuuacucagaggaacagca

SEQ ID NO: 14509 - RNA, 19 nt, artificial
  Oligomer
agaauagguuuccaacagc

SEQ ID NO: 14510 - RNA, 19 nt, artificial
  Oligomer
cugaauucgucccaacucc

SEQ ID NO: 14511 - RNA, 19 nt, artificial
  Oligomer
gagaaggcaaacguuugga

SEQ ID NO: 14512 - RNA, 19 nt, artificial
  Oligomer
agaaggcaaacguuuggag

SEQ ID NO: 14513 - RNA, 19 nt, artificial
  Oligomer
gaauagguuuccaacagcu

SEQ ID NO: 14514 - RNA, 19 nt, artificial
  Oligomer
cuugagcugccugaauucg

SEQ ID NO: 14515 - RNA, 19 nt, artificial
  Oligomer
uugagcugccugaauucgu

SEQ ID NO: 14516 - RNA, 19 nt, artificial
  Oligomer
guccuuugcagcuuucuug

SEQ ID NO: 14517 - RNA, 19 nt, artificial
  Oligomer
gucugacguuuccaacacg

SEQ ID NO: 14518 - RNA, 19 nt, artificial
  Oligomer
gagaauagguuuccaacag

SEQ ID NO: 14519 - RNA, 19 nt, artificial
  Oligomer
ugagcugccugaauucguc

SEQ ID NO: 14520 - RNA, 19 nt, artificial
  Oligomer
cuuuacucagaggaacagc

SEQ ID NO: 14521 - RNA, 19 nt, artificial
  Oligomer
agccucuugaucugcacca

SEQ ID NO: 14522 - RNA, 19 nt, artificial
  Oligomer
aauccuggcaacaccucaa

SEQ ID NO: 14523 - RNA, 19 nt, artificial
  Oligomer
auagguuuccaacagcugc

SEQ ID NO: 14524 - RNA, 19 nt, artificial
  Oligomer
auuccugaaaugggcgagg

SEQ ID NO: 14525 - RNA, 19 nt, artificial
  Oligomer
cagaggaacagcaaauggc

SEQ ID NO: 14526 - RNA, 19 nt, artificial
  Oligomer
gucuccuugagggucuuga

SEQ ID NO: 14527 - RNA, 19 nt, artificial
  Oligomer
ucagaggaacagcaaaugg

SEQ ID NO: 14528 - RNA, 19 nt, artificial
  Oligomer
agauuccugaaaugggcga

SEQ ID NO: 14529 - RNA, 19 nt, artificial
  Oligomer
gauuccugaaaugggcgag

SEQ ID NO: 14530 - RNA, 19 nt, artificial
  Oligomer
aguggugcaucgagaagcu

SEQ ID NO: 14531 - RNA, 19 nt, artificial
  Oligomer
uugcacugaaacuggguau

SEQ ID NO: 14532 - RNA, 19 nt, artificial
  Oligomer
cacugaaacuggguaucgg

SEQ ID NO: 14533 - RNA, 19 nt, artificial
  Oligomer
uuccaggcugcagauuccu

SEQ ID NO: 14534 - RNA, 19 nt, artificial
  Oligomer
cagauuccugaaaugggcg

SEQ ID NO: 14535 - RNA, 19 nt, artificial
  Oligomer
aaggucuccuugagggucu

SEQ ID NO: 14536 - RNA, 19 nt, artificial
  Oligomer
cugcagauuccugaaaugg

SEQ ID NO: 14537 - RNA, 19 nt, artificial
  Oligomer
ugcagauuccugaaauggg

SEQ ID NO: 14538 - RNA, 19 nt, artificial
  Oligomer
uuugcagcuuucuugcugu

SEQ ID NO: 14539 - RNA, 19 nt, artificial
  Oligomer
acugaaacuggguaucggg

SEQ ID NO: 14540 - RNA, 19 nt, artificial
  Oligomer
cuccgagaauagguuucca

SEQ ID NO: 14541 - RNA, 19 nt, artificial
  Oligomer
uuccugaaaugggcgagga

SEQ ID NO: 14542 - RNA, 19 nt, artificial
  Oligomer
auccuggcaacaccucaag

SEQ ID NO: 14543 - RNA, 19 nt, artificial
  Oligomer
gcagauuccugaaaugggc

SEQ ID NO: 14544 - RNA, 19 nt, artificial
  Oligomer
cuuugcagcuuucuugcug

SEQ ID NO: 14545 - RNA, 19 nt, artificial
  Oligomer
aaggcaaacguuuggagcc

SEQ ID NO: 14546 - RNA, 19 nt, artificial
  Oligomer
cugggauagaauccuggca

SEQ ID NO: 14547 - RNA, 19 nt, artificial
  Oligomer
ccuccgagaauagguuucc

SEQ ID NO: 14548 - RNA, 19 nt, artificial
  Oligomer
aauagguuuccaacagcug

SEQ ID NO: 14549 - RNA, 19 nt, artificial
  Oligomer
uugcagcuuucuugcuguc

SEQ ID NO: 14550 - RNA, 19 nt, artificial
  Oligomer
uagguuuccaacagcugca

SEQ ID NO: 14551 - RNA, 19 nt, artificial
  Oligomer
aggcaaacguuuggagccu

SEQ ID NO: 14552 - RNA, 19 nt, artificial
  Oligomer
ugcagcuuucuugcugucc

SEQ ID NO: 14553 - RNA, 19 nt, artificial
  Oligomer
agguuuccaacagcugcag

SEQ ID NO: 14554 - RNA, 19 nt, artificial
  Oligomer
agaggaacagcaaauggcc

SEQ ID NO: 14555 - RNA, 21 nt, artificial
  Oligomer
ggacgaauucaggcagcucaa

SEQ ID NO: 14556 - RNA, 21 nt, artificial
  Oligomer
gcagaucaagaggcuccaaac

SEQ ID NO: 14557 - RNA, 21 nt, artificial
  Oligomer
gcuucucgaugcaccacuguu

SEQ ID NO: 14558 - RNA, 21 nt, artificial
  Oligomer
cgaauucaggcagcucaagac

SEQ ID NO: 14559 - RNA, 21 nt, artificial
  Oligomer
gcuccaaacguuugccuucuc

SEQ ID NO: 14560 - RNA, 21 nt, artificial
  Oligomer
cuccaaacguuugccuucucu

SEQ ID NO: 14561 - RNA, 21 nt, artificial
  Oligomer
aucaagaggcuccaaacguuu

SEQ ID NO: 14562 - RNA, 21 nt, artificial
  Oligomer
gugcagaucaagaggcuccaa

SEQ ID NO: 14563 - RNA, 21 nt, artificial
  Oligomer
agcuguuggaaaccuauucuc

SEQ ID NO: 14564 - RNA, 21 nt, artificial
  Oligomer
cauuugcuguuccucugagua

SEQ ID NO: 14565 - RNA, 21 nt, artificial
  Oligomer
uccaaacguuugccuucucug

SEQ ID NO: 14566 - RNA, 21 nt, artificial
  Oligomer
ugcagaucaagaggcuccaaa

SEQ ID NO: 14567 - RNA, 21 nt, artificial
  Oligomer
gcuugagguguugccaggauu

SEQ ID NO: 14568 - RNA, 21 nt, artificial
  Oligomer
gcaggaguugggacgaauuca

SEQ ID NO: 14569 - RNA, 21 nt, artificial
  Oligomer
ugagguguugccaggauucua

SEQ ID NO: 14570 - RNA, 21 nt, artificial
  Oligomer
ccauuugcuguuccucugagu

SEQ ID NO: 14571 - RNA, 21 nt, artificial
  Oligomer
cgauacccaguuucagugcaa

SEQ ID NO: 14572 - RNA, 21 nt, artificial
  Oligomer
ccauuucaggaaucugcagcc

SEQ ID NO: 14573 - RNA, 21 nt, artificial
  Oligomer
ggacagcaagaaagcugcaaa

SEQ ID NO: 14574 - RNA, 21 nt, artificial
  Oligomer
cgcccauuucaggaaucugca

SEQ ID NO: 14575 - RNA, 21 nt, artificial
  Oligomer
gccauuugcuguuccucugag

SEQ ID NO: 14576 - RNA, 21 nt, artificial
  Oligomer
gcagcuguuggaaaccuauuc

SEQ ID NO: 14577 - RNA, 21 nt, artificial
  Oligomer
agcuucucgaugcaccacugu

SEQ ID NO: 14578 - RNA, 21 nt, artificial
  Oligomer
gcuguuccucugaguaaagcu

SEQ ID NO: 14579 - RNA, 21 nt, artificial
  Oligomer
caagacccucaaggagaccuu

SEQ ID NO: 14580 - RNA, 21 nt, artificial
  Oligomer
ccucgcccauuucaggaaucu

SEQ ID NO: 14581 - RNA, 21 nt, artificial
  Oligomer
gagguguugccaggauucuau

SEQ ID NO: 14582 - RNA, 21 nt, artificial
  Oligomer
gcaagaaagcugcaaaggacu

SEQ ID NO: 14583 - RNA, 21 nt, artificial
  Oligomer
gggacagcaagaaagcugcaa

SEQ ID NO: 14584 - RNA, 21 nt, artificial
  Oligomer
ccgauacccaguuucagugca

SEQ ID NO: 14585 - RNA, 21 nt, artificial
  Oligomer
cucgcccauuucaggaaucug

SEQ ID NO: 14586 - RNA, 21 nt, artificial
  Oligomer
guccucgcccauuucaggaau

SEQ ID NO: 14587 - RNA, 21 nt, artificial
  Oligomer
agguguugccaggauucuauc

SEQ ID NO: 14588 - RNA, 21 nt, artificial
  Oligomer
ggaaaccuauucucggaggcu

SEQ ID NO: 14589 - RNA, 21 nt, artificial
  Oligomer
gcccauuucaggaaucugcag

SEQ ID NO: 14590 - RNA, 21 nt, artificial
  Oligomer
cagcuguuggaaaccuauucu

SEQ ID NO: 14591 - RNA, 21 nt, artificial
  Oligomer
ccugcagcuguuggaaaccua

SEQ ID NO: 14592 - RNA, 21 nt, artificial
  Oligomer
uccucgcccauuucaggaauc

SEQ ID NO: 14593 - RNA, 21 nt, artificial
  Oligomer
ggcuccaaacguuugccuucu

SEQ ID NO: 14594 - RNA, 21 nt, artificial
  Oligomer
gaggcuccaaacguuugccuu

SEQ ID NO: 14595 - RNA, 21 nt, artificial
  Oligomer
cugcagcuguuggaaaccuau

SEQ ID NO: 14596 - RNA, 21 nt, artificial
  Oligomer
gacagcaagaaagcugcaaag

SEQ ID NO: 14597 - RNA, 21 nt, artificial
  Oligomer
ccaaacguuugccuucucugu

SEQ ID NO: 14598 - RNA, 21 nt, artificial
  Oligomer
ugcagcuguuggaaaccuauu

SEQ ID NO: 14599 - RNA, 21 nt, artificial
  Oligomer
ggccauuugcuguuccucuga

SEQ ID NO: 14600 - RNA, 21 nt, artificial
  Oligomer
ucaggaaucugcagccuggaa

SEQ ID NO: 14601 - RNA, 21 nt, artificial
  Oligomer
uugagcugccugaauucgucc

SEQ ID NO: 14602 - RNA, 21 nt, artificial
  Oligomer
guuuggagccucuugaucugc

SEQ ID NO: 14603 - RNA, 21 nt, artificial
  Oligomer
aacaguggugcaucgagaagc

SEQ ID NO: 14604 - RNA, 21 nt, artificial
  Oligomer
gucuugagcugccugaauucg

SEQ ID NO: 14605 - RNA, 21 nt, artificial
  Oligomer
gagaaggcaaacguuuggagc

SEQ ID NO: 14606 - RNA, 21 nt, artificial
  Oligomer
agagaaggcaaacguuuggag

SEQ ID NO: 14607 - RNA, 21 nt, artificial
  Oligomer
aaacguuuggagccucuugau

SEQ ID NO: 14608 - RNA, 21 nt, artificial
  Oligomer
uuggagccucuugaucugcac

SEQ ID NO: 14609 - RNA, 21 nt, artificial
  Oligomer
gagaauagguuuccaacagcu

SEQ ID NO: 14610 - RNA, 21 nt, artificial
  Oligomer
uacucagaggaacagcaaaug

SEQ ID NO: 14611 - RNA, 21 nt, artificial
  Oligomer
cagagaaggcaaacguuugga

SEQ ID NO: 14612 - RNA, 21 nt, artificial
  Oligomer
uuuggagccucuugaucugca

SEQ ID NO: 14613 - RNA, 21 nt, artificial
  Oligomer
aauccuggcaacaccucaagc

SEQ ID NO: 14614 - RNA, 21 nt, artificial
  Oligomer
ugaauucgucccaacuccugc

SEQ ID NO: 14615 - RNA, 21 nt, artificial
  Oligomer
uagaauccuggcaacaccuca

SEQ ID NO: 14616 - RNA, 21 nt, artificial
  Oligomer
acucagaggaacagcaaaugg

SEQ ID NO: 14617 - RNA, 21 nt, artificial
  Oligomer
uugcacugaaacuggguaucg

SEQ ID NO: 14618 - RNA, 21 nt, artificial
  Oligomer
ggcugcagauuccugaaaugg

SEQ ID NO: 14619 - RNA, 21 nt, artificial
  Oligomer
uuugcagcuuucuugcugucc

SEQ ID NO: 14620 - RNA, 21 nt, artificial
  Oligomer
ugcagauuccugaaaugggcg

SEQ ID NO: 14621 - RNA, 21 nt, artificial
  Oligomer
cucagaggaacagcaaauggc

SEQ ID NO: 14622 - RNA, 21 nt, artificial
  Oligomer
gaauagguuuccaacagcugc

SEQ ID NO: 14623 - RNA, 21 nt, artificial
  Oligomer
acaguggugcaucgagaagcu

SEQ ID NO: 14624 - RNA, 21 nt, artificial
  Oligomer
agcuuuacucagaggaacagc

SEQ ID NO: 14625 - RNA, 21 nt, artificial
  Oligomer
aaggucuccuugagggucuug

SEQ ID NO: 14626 - RNA, 21 nt, artificial
  Oligomer
agauuccugaaaugggcgagg

SEQ ID NO: 14627 - RNA, 21 nt, artificial
  Oligomer
auagaauccuggcaacaccuc

SEQ ID NO: 14628 - RNA, 21 nt, artificial
  Oligomer
aguccuuugcagcuuucuugc

SEQ ID NO: 14629 - RNA, 21 nt, artificial
  Oligomer
uugcagcuuucuugcuguccc

SEQ ID NO: 14630 - RNA, 21 nt, artificial
  Oligomer
ugcacugaaacuggguaucgg

SEQ ID NO: 14631 - RNA, 21 nt, artificial
  Oligomer
cagauuccugaaaugggcgag

SEQ ID NO: 14632 - RNA, 21 nt, artificial
  Oligomer
auuccugaaaugggcgaggac

SEQ ID NO: 14633 - RNA, 21 nt, artificial
  Oligomer
gauagaauccuggcaacaccu

SEQ ID NO: 14634 - RNA, 21 nt, artificial
  Oligomer
agccuccgagaauagguuucc

SEQ ID NO: 14635 - RNA, 21 nt, artificial
  Oligomer
cugcagauuccugaaaugggc

SEQ ID NO: 14636 - RNA, 21 nt, artificial
  Oligomer
agaauagguuuccaacagcug

SEQ ID NO: 14637 - RNA, 21 nt, artificial
  Oligomer
uagguuuccaacagcugcagg

SEQ ID NO: 14638 - RNA, 21 nt, artificial
  Oligomer
gauuccugaaaugggcgagga

SEQ ID NO: 14639 - RNA, 21 nt, artificial
  Oligomer
agaaggcaaacguuuggagcc

SEQ ID NO: 14640 - RNA, 21 nt, artificial
  Oligomer
aaggcaaacguuuggagccuc

SEQ ID NO: 14641 - RNA, 21 nt, artificial
  Oligomer
auagguuuccaacagcugcag

SEQ ID NO: 14642 - RNA, 21 nt, artificial
  Oligomer
cuuugcagcuuucuugcuguc

SEQ ID NO: 14643 - RNA, 21 nt, artificial
  Oligomer
acagagaaggcaaacguuugg

SEQ ID NO: 14644 - RNA, 21 nt, artificial
  Oligomer
aauagguuuccaacagcugca

SEQ ID NO: 14645 - RNA, 21 nt, artificial
  Oligomer
ucagaggaacagcaaauggcc

SEQ ID NO: 14646 - RNA, 21 nt, artificial
  Oligomer
uuccaggcugcagauuccuga

SEQ ID NO: 14647 - RNA, 19 nt, artificial
  Oligomer
ccuguacauacguguucua

SEQ ID NO: 14648 - RNA, 19 nt, artificial
  Oligomer
gggcgaucaauccagagaa

SEQ ID NO: 14649 - RNA, 19 nt, artificial
  Oligomer
guacauacguguucuauag

SEQ ID NO: 14650 - RNA, 19 nt, artificial
  Oligomer
ccauugccaacuacgagaa

SEQ ID NO: 14651 - RNA, 19 nt, artificial
  Oligomer
acauacguguucuauagag

SEQ ID NO: 14652 - RNA, 19 nt, artificial
  Oligomer
caaaaaagccagagacaua

SEQ ID NO: 14653 - RNA, 19 nt, artificial
  Oligomer
acaaaaaagccagagacau

SEQ ID NO: 14654 - RNA, 19 nt, artificial
  Oligomer
gccuguacauacguguucu

SEQ ID NO: 14655 - RNA, 19 nt, artificial
  Oligomer
ccguccauguaccugcaaa

SEQ ID NO: 14656 - RNA, 19 nt, artificial
  Oligomer
cuguacauacguguucuau

SEQ ID NO: 14657 - RNA, 19 nt, artificial
  Oligomer
ucagaugaaagcaaagcga

SEQ ID NO: 14658 - RNA, 19 nt, artificial
  Oligomer
cgaucaauccagagaacag

SEQ ID NO: 14659 - RNA, 19 nt, artificial
  Oligomer
cguccauguaccugcaaaa

SEQ ID NO: 14660 - RNA, 19 nt, artificial
  Oligomer
gugguucugucagaugaaa

SEQ ID NO: 14661 - RNA, 19 nt, artificial
  Oligomer
gccaacuacgagaagaccu

SEQ ID NO: 14662 - RNA, 19 nt, artificial
  Oligomer
acauacuugaugcccaaag

SEQ ID NO: 14663 - RNA, 19 nt, artificial
  Oligomer
ccagagacauacuugaugc

SEQ ID NO: 14664 - RNA, 19 nt, artificial
  Oligomer
ggacaaccagacaaaaaag

SEQ ID NO: 14665 - RNA, 19 nt, artificial
  Oligomer
gcgaucaauccagagaaca

SEQ ID NO: 14666 - RNA, 19 nt, artificial
  Oligomer
ugccuguacauacguguuc

SEQ ID NO: 14667 - RNA, 19 nt, artificial
  Oligomer
gccauugccaacuacgaga

SEQ ID NO: 14668 - RNA, 19 nt, artificial
  Oligomer
agccagagacauacuugau

SEQ ID NO: 14669 - RNA, 19 nt, artificial
  Oligomer
aaaagccagagacauacuu

SEQ ID NO: 14670 - RNA, 19 nt, artificial
  Oligomer
ggugguucugucagaugaa

SEQ ID NO: 14671 - RNA, 19 nt, artificial
  Oligomer
uguacauguuccuggugaa

SEQ ID NO: 14672 - RNA, 19 nt, artificial
  Oligomer
gugccuguacauacguguu

SEQ ID NO: 14673 - RNA, 19 nt, artificial
  Oligomer
gcuacuucccguccaugua

SEQ ID NO: 14674 - RNA, 19 nt, artificial
  Oligomer
guguacauguuccugguga

SEQ ID NO: 14675 - RNA, 19 nt, artificial
  Oligomer
cgugccuguacauacgugu

SEQ ID NO: 14676 - RNA, 19 nt, artificial
  Oligomer
uggugggucaucaggaaag

SEQ ID NO: 14677 - RNA, 19 nt, artificial
  Oligomer
acaccuucauccgucacau

SEQ ID NO: 14678 - RNA, 19 nt, artificial
  Oligomer
uggugguucugucagauga

SEQ ID NO: 14679 - RNA, 19 nt, artificial
  Oligomer
ugguggaggucguagagaa

SEQ ID NO: 14680 - RNA, 19 nt, artificial
  Oligomer
gucguagagaagagcgaga

SEQ ID NO: 14681 - RNA, 19 nt, artificial
  Oligomer
agaguaccgcgacagacau

SEQ ID NO: 14682 - RNA, 19 nt, artificial
  Oligomer
acgaguuccauaaaaccuu

SEQ ID NO: 14683 - RNA, 19 nt, artificial
  Oligomer
gguuggugguucugucaga

SEQ ID NO: 14684 - RNA, 19 nt, artificial
  Oligomer
gcaacagcguccguuuucu

SEQ ID NO: 14685 - RNA, 19 nt, artificial
  Oligomer
guuggugguucugucagau

SEQ ID NO: 14686 - RNA, 19 nt, artificial
  Oligomer
uggaggucguagagaagag

SEQ ID NO: 14687 - RNA, 19 nt, artificial
  Oligomer
ccagacaaaaaagccagag

SEQ ID NO: 14688 - RNA, 19 nt, artificial
  Oligomer
ccacggacaaccagacaaa

SEQ ID NO: 14689 - RNA, 19 nt, artificial
  Oligomer
aucuacgaguuccauaaaa

SEQ ID NO: 14690 - RNA, 19 nt, artificial
  Oligomer
ugucggagaagguggucua

SEQ ID NO: 14691 - RNA, 19 nt, artificial
  Oligomer
cuuccucuuuccagugcau

SEQ ID NO: 14692 - RNA, 19 nt, artificial
  Oligomer
aggucauucacaagcuccu

SEQ ID NO: 14693 - RNA, 19 nt, artificial
  Oligomer
cagacaaaaaagccagaga

SEQ ID NO: 14694 - RNA, 19 nt, artificial
  Oligomer
cagcucccaagugguuuga

SEQ ID NO: 14695 - RNA, 19 nt, artificial
  Oligomer
gccagcacuauguguacau

SEQ ID NO: 14696 - RNA, 19 nt, artificial
  Oligomer
cggacaaccagacaaaaaa

SEQ ID NO: 14697 - RNA, 19 nt, artificial
  Oligomer
gaguuccauaaaaccuuaa

SEQ ID NO: 14698 - RNA, 19 nt, artificial
  Oligomer
agacaaaaaagccagagac

SEQ ID NO: 14699 - RNA, 19 nt, artificial
  Oligomer
accagacaaaaaagccaga

SEQ ID NO: 14700 - RNA, 19 nt, artificial
  Oligomer
acggacaaccagacaaaaa

SEQ ID NO: 14701 - RNA, 19 nt, artificial
  Oligomer
ucaggaaagacgacgucac

SEQ ID NO: 14702 - RNA, 19 nt, artificial
  Oligomer
ccaacuacgagaagaccuc

SEQ ID NO: 14703 - RNA, 19 nt, artificial
  Oligomer
agacauacuugaugcccaa

SEQ ID NO: 14704 - RNA, 19 nt, artificial
  Oligomer
ggcacacuuaccgaguacu

SEQ ID NO: 14705 - RNA, 19 nt, artificial
  Oligomer
ccucuuuccagugcauuua

SEQ ID NO: 14706 - RNA, 19 nt, artificial
  Oligomer
uucugucagaugaaagcaa

SEQ ID NO: 14707 - RNA, 19 nt, artificial
  Oligomer
cacggacaaccagacaaaa

SEQ ID NO: 14708 - RNA, 19 nt, artificial
  Oligomer
cgacuuccucuuuccagug

SEQ ID NO: 14709 - RNA, 19 nt, artificial
  Oligomer
ucaauccagagaacaggau

SEQ ID NO: 14710 - RNA, 19 nt, artificial
  Oligomer
accuccucgacuucuucaa

SEQ ID NO: 14711 - RNA, 19 nt, artificial
  Oligomer
cucuuuccagugcauuuaa

SEQ ID NO: 14712 - RNA, 19 nt, artificial
  Oligomer
ucugucagaugaaagcaaa

SEQ ID NO: 14713 - RNA, 19 nt, artificial
  Oligomer
cccaaagauggcaagagua

SEQ ID NO: 14714 - RNA, 19 nt, artificial
  Oligomer
ugaaauggcaggaccuguc

SEQ ID NO: 14715 - RNA, 19 nt, artificial
  Oligomer
agcacuauguguacauguu

SEQ ID NO: 14716 - RNA, 19 nt, artificial
  Oligomer
ccagcacuauguguacaug

SEQ ID NO: 14717 - RNA, 19 nt, artificial
  Oligomer
ugggcuuugagaagcgcuu

SEQ ID NO: 14718 - RNA, 19 nt, artificial
  Oligomer
ugaugcccaaagauggcaa

SEQ ID NO: 14719 - RNA, 19 nt, artificial
  Oligomer
caaccagacaaaaaagcca

SEQ ID NO: 14720 - RNA, 19 nt, artificial
  Oligomer
ccagagaacaggaucaucc

SEQ ID NO: 14721 - RNA, 19 nt, artificial
  Oligomer
gcaaaagucagggcaagac

SEQ ID NO: 14722 - RNA, 19 nt, artificial
  Oligomer
gcuuugagaagcgcuucgu

SEQ ID NO: 14723 - RNA, 19 nt, artificial
  Oligomer
agcccaacuaugcagguga

SEQ ID NO: 14724 - RNA, 19 nt, artificial
  Oligomer
gagacauacuugaugccca

SEQ ID NO: 14725 - RNA, 19 nt, artificial
  Oligomer
uccucgacuucuucaaggu

SEQ ID NO: 14726 - RNA, 19 nt, artificial
  Oligomer
uccucuuuccagugcauuu

SEQ ID NO: 14727 - RNA, 19 nt, artificial
  Oligomer
gcacuauguguacauguuc

SEQ ID NO: 14728 - RNA, 19 nt, artificial
  Oligomer
ucaucaggaaagacgacgu

SEQ ID NO: 14729 - RNA, 19 nt, artificial
  Oligomer
caacuaugcaggugagcca

SEQ ID NO: 14730 - RNA, 19 nt, artificial
  Oligomer
gacauacuugaugcccaaa

SEQ ID NO: 14731 - RNA, 19 nt, artificial
  Oligomer
auccagagaacaggaucau

SEQ ID NO: 14732 - RNA, 19 nt, artificial
  Oligomer
ugcccaaagauggcaagag

SEQ ID NO: 14733 - RNA, 19 nt, artificial
  Oligomer
ccagugcauuuaaggcgca

SEQ ID NO: 14734 - RNA, 19 nt, artificial
  Oligomer
ccugcaaaagucagggcaa

SEQ ID NO: 14735 - RNA, 19 nt, artificial
  Oligomer
gggucaucaggaaagacga

SEQ ID NO: 14736 - RNA, 19 nt, artificial
  Oligomer
cugcaaaagucagggcaag

SEQ ID NO: 14737 - RNA, 19 nt, artificial
  Oligomer
agacccugagcccaacuau

SEQ ID NO: 14738 - RNA, 19 nt, artificial
  Oligomer
agccagcacuauguguaca

SEQ ID NO: 14739 - RNA, 19 nt, artificial
  Oligomer
cuaugcaggugagccauac

SEQ ID NO: 14740 - RNA, 19 nt, artificial
  Oligomer
ucauucacaagcuccugga

SEQ ID NO: 14741 - RNA, 19 nt, artificial
  Oligomer
ugaggucauucacaagcuc

SEQ ID NO: 14742 - RNA, 19 nt, artificial
  Oligomer
gacaccuucauccgucaca

SEQ ID NO: 14743 - RNA, 19 nt, artificial
  Oligomer
uagaacacguauguacagg

SEQ ID NO: 14744 - RNA, 19 nt, artificial
  Oligomer
uucucuggauugaucgccc

SEQ ID NO: 14745 - RNA, 19 nt, artificial
  Oligomer
cuauagaacacguauguac

SEQ ID NO: 14746 - RNA, 19 nt, artificial
  Oligomer
uucucguaguuggcaaugg

SEQ ID NO: 14747 - RNA, 19 nt, artificial
  Oligomer
cucuauagaacacguaugu

SEQ ID NO: 14748 - RNA, 19 nt, artificial
  Oligomer
uaugucucuggcuuuuuug

SEQ ID NO: 14749 - RNA, 19 nt, artificial
  Oligomer
augucucuggcuuuuuugu

SEQ ID NO: 14750 - RNA, 19 nt, artificial
  Oligomer
agaacacguauguacaggc

SEQ ID NO: 14751 - RNA, 19 nt, artificial
  Oligomer
uuugcagguacauggacgg

SEQ ID NO: 14752 - RNA, 19 nt, artificial
  Oligomer
auagaacacguauguacag

SEQ ID NO: 14753 - RNA, 19 nt, artificial
  Oligomer
ucgcuuugcuuucaucuga

SEQ ID NO: 14754 - RNA, 19 nt, artificial
  Oligomer
cuguucucuggauugaucg

SEQ ID NO: 14755 - RNA, 19 nt, artificial
  Oligomer
uuuugcagguacauggacg

SEQ ID NO: 14756 - RNA, 19 nt, artificial
  Oligomer
uuucaucugacagaaccac

SEQ ID NO: 14757 - RNA, 19 nt, artificial
  Oligomer
aggucuucucguaguuggc

SEQ ID NO: 14758 - RNA, 19 nt, artificial
  Oligomer
cuuugggcaucaaguaugu

SEQ ID NO: 14759 - RNA, 19 nt, artificial
  Oligomer
gcaucaaguaugucucugg

SEQ ID NO: 14760 - RNA, 19 nt, artificial
  Oligomer
cuuuuuugucugguugucc

SEQ ID NO: 14761 - RNA, 19 nt, artificial
  Oligomer
uguucucuggauugaucgc

SEQ ID NO: 14762 - RNA, 19 nt, artificial
  Oligomer
gaacacguauguacaggca

SEQ ID NO: 14763 - RNA, 19 nt, artificial
  Oligomer
ucucguaguuggcaauggc

SEQ ID NO: 14764 - RNA, 19 nt, artificial
  Oligomer
aucaaguaugucucuggcu

SEQ ID NO: 14765 - RNA, 19 nt, artificial
  Oligomer
aaguaugucucuggcuuuu

SEQ ID NO: 14766 - RNA, 19 nt, artificial
  Oligomer
uucaucugacagaaccacc

SEQ ID NO: 14767 - RNA, 19 nt, artificial
  Oligomer
uucaccaggaacauguaca

SEQ ID NO: 14768 - RNA, 19 nt, artificial
  Oligomer
aacacguauguacaggcac

SEQ ID NO: 14769 - RNA, 19 nt, artificial
  Oligomer
uacauggacgggaaguagc

SEQ ID NO: 14770 - RNA, 19 nt, artificial
  Oligomer
ucaccaggaacauguacac

SEQ ID NO: 14771 - RNA, 19 nt, artificial
  Oligomer
acacguauguacaggcacg

SEQ ID NO: 14772 - RNA, 19 nt, artificial
  Oligomer
cuuuccugaugacccacca

SEQ ID NO: 14773 - RNA, 19 nt, artificial
  Oligomer
augugacggaugaaggugu

SEQ ID NO: 14774 - RNA, 19 nt, artificial
  Oligomer
ucaucugacagaaccacca

SEQ ID NO: 14775 - RNA, 19 nt, artificial
  Oligomer
uucucuacgaccuccacca

SEQ ID NO: 14776 - RNA, 19 nt, artificial
  Oligomer
ucucgcucuucucuacgac

SEQ ID NO: 14777 - RNA, 19 nt, artificial
  Oligomer
augucugucgcgguacucu

SEQ ID NO: 14778 - RNA, 19 nt, artificial
  Oligomer
aagguuuuauggaacucgu

SEQ ID NO: 14779 - RNA, 19 nt, artificial
  Oligomer
ucugacagaaccaccaacc

SEQ ID NO: 14780 - RNA, 19 nt, artificial
  Oligomer
agaaaacggacgcuguugc

SEQ ID NO: 14781 - RNA, 19 nt, artificial
  Oligomer
aucugacagaaccaccaac

SEQ ID NO: 14782 - RNA, 19 nt, artificial
  Oligomer
cucuucucuacgaccucca

SEQ ID NO: 14783 - RNA, 19 nt, artificial
  Oligomer
cucuggcuuuuuugucugg

SEQ ID NO: 14784 - RNA, 19 nt, artificial
  Oligomer
uuugucugguuguccgugg

SEQ ID NO: 14785 - RNA, 19 nt, artificial
  Oligomer
uuuuauggaacucguagau

SEQ ID NO: 14786 - RNA, 19 nt, artificial
  Oligomer
uagaccaccuucuccgaca

SEQ ID NO: 14787 - RNA, 19 nt, artificial
  Oligomer
augcacuggaaagaggaag

SEQ ID NO: 14788 - RNA, 19 nt, artificial
  Oligomer
aggagcuugugaaugaccu

SEQ ID NO: 14789 - RNA, 19 nt, artificial
  Oligomer
ucucuggcuuuuuugucug

SEQ ID NO: 14790 - RNA, 19 nt, artificial
  Oligomer
ucaaaccacuugggagcug

SEQ ID NO: 14791 - RNA, 19 nt, artificial
  Oligomer
auguacacauagugcuggc

SEQ ID NO: 14792 - RNA, 19 nt, artificial
  Oligomer
uuuuuugucugguuguccg

SEQ ID NO: 14793 - RNA, 19 nt, artificial
  Oligomer
uuaagguuuuauggaacuc

SEQ ID NO: 14794 - RNA, 19 nt, artificial
  Oligomer
gucucuggcuuuuuugucu

SEQ ID NO: 14795 - RNA, 19 nt, artificial
  Oligomer
ucuggcuuuuuugucuggu

SEQ ID NO: 14796 - RNA, 19 nt, artificial
  Oligomer
uuuuugucugguuguccgu

SEQ ID NO: 14797 - RNA, 19 nt, artificial
  Oligomer
gugacgucgucuuuccuga

SEQ ID NO: 14798 - RNA, 19 nt, artificial
  Oligomer
gaggucuucucguaguugg

SEQ ID NO: 14799 - RNA, 19 nt, artificial
  Oligomer
uugggcaucaaguaugucu

SEQ ID NO: 14800 - RNA, 19 nt, artificial
  Oligomer
aguacucgguaagugugcc

SEQ ID NO: 14801 - RNA, 19 nt, artificial
  Oligomer
uaaaugcacuggaaagagg

SEQ ID NO: 14802 - RNA, 19 nt, artificial
  Oligomer
uugcuuucaucugacagaa

SEQ ID NO: 14803 - RNA, 19 nt, artificial
  Oligomer
uuuugucugguuguccgug

SEQ ID NO: 14804 - RNA, 19 nt, artificial
  Oligomer
cacuggaaagaggaagucg

SEQ ID NO: 14805 - RNA, 19 nt, artificial
  Oligomer
auccuguucucuggauuga

SEQ ID NO: 14806 - RNA, 19 nt, artificial
  Oligomer
uugaagaagucgaggaggu

SEQ ID NO: 14807 - RNA, 19 nt, artificial
  Oligomer
uuaaaugcacuggaaagag

SEQ ID NO: 14808 - RNA, 19 nt, artificial
  Oligomer
uuugcuuucaucugacaga

SEQ ID NO: 14809 - RNA, 19 nt, artificial
  Oligomer
uacucuugccaucuuuggg

SEQ ID NO: 14810 - RNA, 19 nt, artificial
  Oligomer
gacagguccugccauuuca

SEQ ID NO: 14811 - RNA, 19 nt, artificial
  Oligomer
aacauguacacauagugcu

SEQ ID NO: 14812 - RNA, 19 nt, artificial
  Oligomer
cauguacacauagugcugg

SEQ ID NO: 14813 - RNA, 19 nt, artificial
  Oligomer
aagcgcuucucaaagccca

SEQ ID NO: 14814 - RNA, 19 nt, artificial
  Oligomer
uugccaucuuugggcauca

SEQ ID NO: 14815 - RNA, 19 nt, artificial
  Oligomer
uggcuuuuuugucugguug

SEQ ID NO: 14816 - RNA, 19 nt, artificial
  Oligomer
ggaugauccuguucucugg

SEQ ID NO: 14817 - RNA, 19 nt, artificial
  Oligomer
gucuugcccugacuuuugc

SEQ ID NO: 14818 - RNA, 19 nt, artificial
  Oligomer
acgaagcgcuucucaaagc

SEQ ID NO: 14819 - RNA, 19 nt, artificial
  Oligomer
ucaccugcauaguugggcu

SEQ ID NO: 14820 - RNA, 19 nt, artificial
  Oligomer
ugggcaucaaguaugucuc

SEQ ID NO: 14821 - RNA, 19 nt, artificial
  Oligomer
accuugaagaagucgagga

SEQ ID NO: 14822 - RNA, 19 nt, artificial
  Oligomer
aaaugcacuggaaagagga

SEQ ID NO: 14823 - RNA, 19 nt, artificial
  Oligomer
gaacauguacacauagugc

SEQ ID NO: 14824 - RNA, 19 nt, artificial
  Oligomer
acgucgucuuuccugauga

SEQ ID NO: 14825 - RNA, 19 nt, artificial
  Oligomer
uggcucaccugcauaguug

SEQ ID NO: 14826 - RNA, 19 nt, artificial
  Oligomer
uuugggcaucaaguauguc

SEQ ID NO: 14827 - RNA, 19 nt, artificial
  Oligomer
augauccuguucucuggau

SEQ ID NO: 14828 - RNA, 19 nt, artificial
  Oligomer
cucuugccaucuuugggca

SEQ ID NO: 14829 - RNA, 19 nt, artificial
  Oligomer
ugcgccuuaaaugcacugg

SEQ ID NO: 14830 - RNA, 19 nt, artificial
  Oligomer
uugcccugacuuuugcagg

SEQ ID NO: 14831 - RNA, 19 nt, artificial
  Oligomer
ucgucuuuccugaugaccc

SEQ ID NO: 14832 - RNA, 19 nt, artificial
  Oligomer
cuugcccugacuuuugcag

SEQ ID NO: 14833 - RNA, 19 nt, artificial
  Oligomer
auaguugggcucagggucu

SEQ ID NO: 14834 - RNA, 19 nt, artificial
  Oligomer
uguacacauagugcuggcu

SEQ ID NO: 14835 - RNA, 19 nt, artificial
  Oligomer
guauggcucaccugcauag

SEQ ID NO: 14836 - RNA, 19 nt, artificial
  Oligomer
uccaggagcuugugaauga

SEQ ID NO: 14837 - RNA, 19 nt, artificial
  Oligomer
gagcuugugaaugaccuca

SEQ ID NO: 14838 - RNA, 19 nt, artificial
  Oligomer
ugugacggaugaagguguc

SEQ ID NO: 14839 - RNA, 21 nt, artificial
  Oligomer
gccuguacauacguguucuau

SEQ ID NO: 14840 - RNA, 21 nt, artificial
  Oligomer
acauacuugaugcccaaagau

SEQ ID NO: 14841 - RNA, 21 nt, artificial
  Oligomer
ugccuguacauacguguucua

SEQ ID NO: 14842 - RNA, 21 nt, artificial
  Oligomer
cccguccauguaccugcaaaa

SEQ ID NO: 14843 - RNA, 21 nt, artificial
  Oligomer
caaaaaagccagagacauacu

SEQ ID NO: 14844 - RNA, 21 nt, artificial
  Oligomer
ccuguacauacguguucuaua

SEQ ID NO: 14845 - RNA, 21 nt, artificial
  Oligomer
gggcgaucaauccagagaaca

SEQ ID NO: 14846 - RNA, 21 nt, artificial
  Oligomer
gccauugccaacuacgagaag

SEQ ID NO: 14847 - RNA, 21 nt, artificial
  Oligomer
uguacauacguguucuauaga

SEQ ID NO: 14848 - RNA, 21 nt, artificial
  Oligomer
cuguacauacguguucuauag

SEQ ID NO: 14849 - RNA, 21 nt, artificial
  Oligomer
aaagccagagacauacuugau

SEQ ID NO: 14850 - RNA, 21 nt, artificial
  Oligomer
ggcgaucaauccagagaacag

SEQ ID NO: 14851 - RNA, 21 nt, artificial
  Oligomer
guguacauguuccuggugaaa

SEQ ID NO: 14852 - RNA, 21 nt, artificial
  Oligomer
ccauugccaacuacgagaaga

SEQ ID NO: 14853 - RNA, 21 nt, artificial
  Oligomer
cccacggacaaccagacaaaa

SEQ ID NO: 14854 - RNA, 21 nt, artificial
  Oligomer
gugccuguacauacguguucu

SEQ ID NO: 14855 - RNA, 21 nt, artificial
  Oligomer
ccguccauguaccugcaaaag

SEQ ID NO: 14856 - RNA, 21 nt, artificial
  Oligomer
cgguuggugguucugucagau

SEQ ID NO: 14857 - RNA, 21 nt, artificial
  Oligomer
uguguacauguuccuggugaa

SEQ ID NO: 14858 - RNA, 21 nt, artificial
  Oligomer
ggugaagcuguugaggucauu

SEQ ID NO: 14859 - RNA, 21 nt, artificial
  Oligomer
cgaguuccauaaaaccuuaaa

SEQ ID NO: 14860 - RNA, 21 nt, artificial
  Oligomer
cuacuucccguccauguaccu

SEQ ID NO: 14861 - RNA, 21 nt, artificial
  Oligomer
cuggugggucaucaggaaaga

SEQ ID NO: 14862 - RNA, 21 nt, artificial
  Oligomer
uuggugguucugucagaugaa

SEQ ID NO: 14863 - RNA, 21 nt, artificial
  Oligomer
ucccguccauguaccugcaaa

SEQ ID NO: 14864 - RNA, 21 nt, artificial
  Oligomer
gggugaagcuguugaggucau

SEQ ID NO: 14865 - RNA, 21 nt, artificial
  Oligomer
uggugguucugucagaugaaa

SEQ ID NO: 14866 - RNA, 21 nt, artificial
  Oligomer
gacuuccucuuuccagugcau

SEQ ID NO: 14867 - RNA, 21 nt, artificial
  Oligomer
cuauguguacauguuccuggu

SEQ ID NO: 14868 - RNA, 21 nt, artificial
  Oligomer
caagaguaccgcgacagacau

SEQ ID NO: 14869 - RNA, 21 nt, artificial
  Oligomer
gguuggugguucugucagaug

SEQ ID NO: 14870 - RNA, 21 nt, artificial
  Oligomer
agggugaagcuguugagguca

SEQ ID NO: 14871 - RNA, 21 nt, artificial
  Oligomer
ccagacaaaaaagccagagac

SEQ ID NO: 14872 - RNA, 21 nt, artificial
  Oligomer
acgaguuccauaaaaccuuaa

SEQ ID NO: 14873 - RNA, 21 nt, artificial
  Oligomer
gaucuacgaguuccauaaaac

SEQ ID NO: 14874 - RNA, 21 nt, artificial
  Oligomer
gugaagcuguugaggucauuc

SEQ ID NO: 14875 - RNA, 21 nt, artificial
  Oligomer
ugagccauacgucgccaucaa

SEQ ID NO: 14876 - RNA, 21 nt, artificial
  Oligomer
agagacauacuugaugcccaa

SEQ ID NO: 14877 - RNA, 21 nt, artificial
  Oligomer
cuacgaguuccauaaaaccuu

SEQ ID NO: 14878 - RNA, 21 nt, artificial
  Oligomer
acuuccucuuuccagugcauu

SEQ ID NO: 14879 - RNA, 21 nt, artificial
  Oligomer
cagacaaaaaagccagagaca

SEQ ID NO: 14880 - RNA, 21 nt, artificial
  Oligomer
ccacggacaaccagacaaaaa

SEQ ID NO: 14881 - RNA, 21 nt, artificial
  Oligomer
uacgaguuccauaaaaccuua

SEQ ID NO: 14882 - RNA, 21 nt, artificial
  Oligomer
ccuuaaaagaaauguucccua

SEQ ID NO: 14883 - RNA, 21 nt, artificial
  Oligomer
guacauguuccuggugaaaug

SEQ ID NO: 14884 - RNA, 21 nt, artificial
  Oligomer
cgacuuccucuuuccagugca

SEQ ID NO: 14885 - RNA, 21 nt, artificial
  Oligomer
caaccagacaaaaaagccaga

SEQ ID NO: 14886 - RNA, 21 nt, artificial
  Oligomer
acggacaaccagacaaaaaag

SEQ ID NO: 14887 - RNA, 21 nt, artificial
  Oligomer
cacggacaaccagacaaaaaa

SEQ ID NO: 14888 - RNA, 21 nt, artificial
  Oligomer
ggcuuugagaagcgcuucgua

SEQ ID NO: 14889 - RNA, 21 nt, artificial
  Oligomer
cgccauugccaacuacgagaa

SEQ ID NO: 14890 - RNA, 21 nt, artificial
  Oligomer
gacaaaaaagccagagacaua

SEQ ID NO: 14891 - RNA, 21 nt, artificial
  Oligomer
guucugucagaugaaagcaaa

SEQ ID NO: 14892 - RNA, 21 nt, artificial
  Oligomer
agacaaaaaagccagagacau

SEQ ID NO: 14893 - RNA, 21 nt, artificial
  Oligomer
ccaccuccucgacuucuucaa

SEQ ID NO: 14894 - RNA, 21 nt, artificial
  Oligomer
ccaacuaugcaggugagccau

SEQ ID NO: 14895 - RNA, 21 nt, artificial
  Oligomer
accagacaaaaaagccagaga

SEQ ID NO: 14896 - RNA, 21 nt, artificial
  Oligomer
uucuucaaggugcgcccugau

SEQ ID NO: 14897 - RNA, 21 nt, artificial
  Oligomer
cgaucaauccagagaacagga

SEQ ID NO: 14898 - RNA, 21 nt, artificial
  Oligomer
uccucuuuccagugcauuuaa

SEQ ID NO: 14899 - RNA, 21 nt, artificial
  Oligomer
cagccagcacuauguguacau

SEQ ID NO: 14900 - RNA, 21 nt, artificial
  Oligomer
gaagacccugagcccaacuau

SEQ ID NO: 14901 - RNA, 21 nt, artificial
  Oligomer
gcccaaagauggcaagaguac

SEQ ID NO: 14902 - RNA, 21 nt, artificial
  Oligomer
gacauacuugaugcccaaaga

SEQ ID NO: 14903 - RNA, 21 nt, artificial
  Oligomer
gagacauacuugaugcccaaa

SEQ ID NO: 14904 - RNA, 21 nt, artificial
  Oligomer
cuccucgacuucuucaaggug

SEQ ID NO: 14905 - RNA, 21 nt, artificial
  Oligomer
caauccagagaacaggaucau

SEQ ID NO: 14906 - RNA, 21 nt, artificial
  Oligomer
ccgugccuguacauacguguu

SEQ ID NO: 14907 - RNA, 21 nt, artificial
  Oligomer
agacgacgucacaggcuacuu

SEQ ID NO: 14908 - RNA, 21 nt, artificial
  Oligomer
gaaagcaaagcgaggcuggau

SEQ ID NO: 14909 - RNA, 21 nt, artificial
  Oligomer
agaugaaagcaaagcgaggcu

SEQ ID NO: 14910 - RNA, 21 nt, artificial
  Oligomer
gguucugucagaugaaagcaa

SEQ ID NO: 14911 - RNA, 21 nt, artificial
  Oligomer
gcacuauguguacauguuccu

SEQ ID NO: 14912 - RNA, 21 nt, artificial
  Oligomer
cagcacuauguguacauguuc

SEQ ID NO: 14913 - RNA, 21 nt, artificial
  Oligomer
ccagcacuauguguacauguu

SEQ ID NO: 14914 - RNA, 21 nt, artificial
  Oligomer
gaaagacgacgucacaggcua

SEQ ID NO: 14915 - RNA, 21 nt, artificial
  Oligomer
ugguucugucagaugaaagca

SEQ ID NO: 14916 - RNA, 21 nt, artificial
  Oligomer
ggacaaccagacaaaaaagcc

SEQ ID NO: 14917 - RNA, 21 nt, artificial
  Oligomer
ccuccucgacuucuucaaggu

SEQ ID NO: 14918 - RNA, 21 nt, artificial
  Oligomer
gcaaaagucagggcaagacgu

SEQ ID NO: 14919 - RNA, 21 nt, artificial
  Oligomer
ugcccaaagauggcaagagua

SEQ ID NO: 14920 - RNA, 21 nt, artificial
  Oligomer
caccuccucgacuucuucaag

SEQ ID NO: 14921 - RNA, 21 nt, artificial
  Oligomer
agggcacacuuaccgaguacu

SEQ ID NO: 14922 - RNA, 21 nt, artificial
  Oligomer
accuuaaaagaaauguucccu

SEQ ID NO: 14923 - RNA, 21 nt, artificial
  Oligomer
caacuaugcaggugagccaua

SEQ ID NO: 14924 - RNA, 21 nt, artificial
  Oligomer
ggacaccuucauccgucacau

SEQ ID NO: 14925 - RNA, 21 nt, artificial
  Oligomer
aaagaaauguucccuauugag

SEQ ID NO: 14926 - RNA, 21 nt, artificial
  Oligomer
gccagcacuauguguacaugu

SEQ ID NO: 14927 - RNA, 21 nt, artificial
  Oligomer
aggcuacuucccguccaugua

SEQ ID NO: 14928 - RNA, 21 nt, artificial
  Oligomer
ggucaucaggaaagacgacgu

SEQ ID NO: 14929 - RNA, 21 nt, artificial
  Oligomer
ugagcccaacuaugcagguga

SEQ ID NO: 14930 - RNA, 21 nt, artificial
  Oligomer
ggugguucugucagaugaaag

SEQ ID NO: 14931 - RNA, 21 nt, artificial
  Oligomer
ccagagacauacuugaugccc

SEQ ID NO: 14932 - RNA, 21 nt, artificial
  Oligomer
gccagagacauacuugaugcc

SEQ ID NO: 14933 - RNA, 21 nt, artificial
  Oligomer
ccucuuuccagugcauuuaag

SEQ ID NO: 14934 - RNA, 21 nt, artificial
  Oligomer
uccauguaccugcaaaaguca

SEQ ID NO: 14935 - RNA, 21 nt, artificial
  Oligomer
ccugcaaaagucagggcaaga

SEQ ID NO: 14936 - RNA, 21 nt, artificial
  Oligomer
ccauguaccugcaaaagucag

SEQ ID NO: 14937 - RNA, 21 nt, artificial
  Oligomer
gugggucaucaggaaagacga

SEQ ID NO: 14938 - RNA, 21 nt, artificial
  Oligomer
gcuguugaggucauucacaag

SEQ ID NO: 14939 - RNA, 21 nt, artificial
  Oligomer
agccagcacuauguguacaug

SEQ ID NO: 14940 - RNA, 21 nt, artificial
  Oligomer
ccagccagcacuauguguaca

SEQ ID NO: 14941 - RNA, 21 nt, artificial
  Oligomer
ggucauucacaagcuccugga

SEQ ID NO: 14942 - RNA, 21 nt, artificial
  Oligomer
agcuguugaggucauucacaa

SEQ ID NO: 14943 - RNA, 21 nt, artificial
  Oligomer
gaagcuguugaggucauucac

SEQ ID NO: 14944 - RNA, 21 nt, artificial
  Oligomer
gucauucacaagcuccuggac

SEQ ID NO: 14945 - RNA, 21 nt, artificial
  Oligomer
gacaccuucauccgucacauc

SEQ ID NO: 14946 - RNA, 21 nt, artificial
  Oligomer
gaggucauucacaagcuccug

SEQ ID NO: 14947 - RNA, 21 nt, artificial
  Oligomer
auagaacacguauguacaggc

SEQ ID NO: 14948 - RNA, 21 nt, artificial
  Oligomer
aucuuugggcaucaaguaugu

SEQ ID NO: 14949 - RNA, 21 nt, artificial
  Oligomer
uagaacacguauguacaggca

SEQ ID NO: 14950 - RNA, 21 nt, artificial
  Oligomer
uuuugcagguacauggacggg

SEQ ID NO: 14951 - RNA, 21 nt, artificial
  Oligomer
aguaugucucuggcuuuuuug

SEQ ID NO: 14952 - RNA, 21 nt, artificial
  Oligomer
uauagaacacguauguacagg

SEQ ID NO: 14953 - RNA, 21 nt, artificial
  Oligomer
uguucucuggauugaucgccc

SEQ ID NO: 14954 - RNA, 21 nt, artificial
  Oligomer
cuucucguaguuggcaauggc

SEQ ID NO: 14955 - RNA, 21 nt, artificial
  Oligomer
ucuauagaacacguauguaca

SEQ ID NO: 14956 - RNA, 21 nt, artificial
  Oligomer
cuauagaacacguauguacag

SEQ ID NO: 14957 - RNA, 21 nt, artificial
  Oligomer
aucaaguaugucucuggcuuu

SEQ ID NO: 14958 - RNA, 21 nt, artificial
  Oligomer
cuguucucuggauugaucgcc

SEQ ID NO: 14959 - RNA, 21 nt, artificial
  Oligomer
uuucaccaggaacauguacac

SEQ ID NO: 14960 - RNA, 21 nt, artificial
  Oligomer
ucuucucguaguuggcaaugg

SEQ ID NO: 14961 - RNA, 21 nt, artificial
  Oligomer
uuuugucugguuguccguggg

SEQ ID NO: 14962 - RNA, 21 nt, artificial
  Oligomer
agaacacguauguacaggcac

SEQ ID NO: 14963 - RNA, 21 nt, artificial
  Oligomer
cuuuugcagguacauggacgg

SEQ ID NO: 14964 - RNA, 21 nt, artificial
  Oligomer
aucugacagaaccaccaaccg

SEQ ID NO: 14965 - RNA, 21 nt, artificial
  Oligomer
uucaccaggaacauguacaca

SEQ ID NO: 14966 - RNA, 21 nt, artificial
  Oligomer
aaugaccucaacagcuucacc

SEQ ID NO: 14967 - RNA, 21 nt, artificial
  Oligomer
uuuaagguuuuauggaacucg

SEQ ID NO: 14968 - RNA, 21 nt, artificial
  Oligomer
agguacauggacgggaaguag

SEQ ID NO: 14969 - RNA, 21 nt, artificial
  Oligomer
ucuuuccugaugacccaccag

SEQ ID NO: 14970 - RNA, 21 nt, artificial
  Oligomer
uucaucugacagaaccaccaa

SEQ ID NO: 14971 - RNA, 21 nt, artificial
  Oligomer
uuugcagguacauggacggga

SEQ ID NO: 14972 - RNA, 21 nt, artificial
  Oligomer
augaccucaacagcuucaccc

SEQ ID NO: 14973 - RNA, 21 nt, artificial
  Oligomer
uuucaucugacagaaccacca

SEQ ID NO: 14974 - RNA, 21 nt, artificial
  Oligomer
augcacuggaaagaggaaguc

SEQ ID NO: 14975 - RNA, 21 nt, artificial
  Oligomer
accaggaacauguacacauag

SEQ ID NO: 14976 - RNA, 21 nt, artificial
  Oligomer
augucugucgcgguacucuug

SEQ ID NO: 14977 - RNA, 21 nt, artificial
  Oligomer
caucugacagaaccaccaacc

SEQ ID NO: 14978 - RNA, 21 nt, artificial
  Oligomer
ugaccucaacagcuucacccu

SEQ ID NO: 14979 - RNA, 21 nt, artificial
  Oligomer
gucucuggcuuuuuugucugg

SEQ ID NO: 14980 - RNA, 21 nt, artificial
  Oligomer
uuaagguuuuauggaacucgu

SEQ ID NO: 14981 - RNA, 21 nt, artificial
  Oligomer
guuuuauggaacucguagauc

SEQ ID NO: 14982 - RNA, 21 nt, artificial
  Oligomer
gaaugaccucaacagcuucac

SEQ ID NO: 14983 - RNA, 21 nt, artificial
  Oligomer
uugauggcgacguauggcuca

SEQ ID NO: 14984 - RNA, 21 nt, artificial
  Oligomer
uugggcaucaaguaugucucu

SEQ ID NO: 14985 - RNA, 21 nt, artificial
  Oligomer
aagguuuuauggaacucguag

SEQ ID NO: 14986 - RNA, 21 nt, artificial
  Oligomer
aaugcacuggaaagaggaagu

SEQ ID NO: 14987 - RNA, 21 nt, artificial
  Oligomer
ugucucuggcuuuuuugucug

SEQ ID NO: 14988 - RNA, 21 nt, artificial
  Oligomer
uuuuugucugguuguccgugg

SEQ ID NO: 14989 - RNA, 21 nt, artificial
  Oligomer
uaagguuuuauggaacucgua

SEQ ID NO: 14990 - RNA, 21 nt, artificial
  Oligomer
uagggaacauuucuuuuaagg

SEQ ID NO: 14991 - RNA, 21 nt, artificial
  Oligomer
cauuucaccaggaacauguac

SEQ ID NO: 14992 - RNA, 21 nt, artificial
  Oligomer
ugcacuggaaagaggaagucg

SEQ ID NO: 14993 - RNA, 21 nt, artificial
  Oligomer
ucuggcuuuuuugucugguug

SEQ ID NO: 14994 - RNA, 21 nt, artificial
  Oligomer
cuuuuuugucugguuguccgu

SEQ ID NO: 14995 - RNA, 21 nt, artificial
  Oligomer
uuuuuugucugguuguccgug

SEQ ID NO: 14996 - RNA, 21 nt, artificial
  Oligomer
uacgaagcgcuucucaaagcc

SEQ ID NO: 14997 - RNA, 21 nt, artificial
  Oligomer
uucucguaguuggcaauggcg

SEQ ID NO: 14998 - RNA, 21 nt, artificial
  Oligomer
uaugucucuggcuuuuuuguc

SEQ ID NO: 14999 - RNA, 21 nt, artificial
  Oligomer
uuugcuuucaucugacagaac

SEQ ID NO: 15000 - RNA, 21 nt, artificial
  Oligomer
augucucuggcuuuuuugucu

SEQ ID NO: 15001 - RNA, 21 nt, artificial
  Oligomer
uugaagaagucgaggaggugg

SEQ ID NO: 15002 - RNA, 21 nt, artificial
  Oligomer
auggcucaccugcauaguugg

SEQ ID NO: 15003 - RNA, 21 nt, artificial
  Oligomer
ucucuggcuuuuuugucuggu

SEQ ID NO: 15004 - RNA, 21 nt, artificial
  Oligomer
aucagggcgcaccuugaagaa

SEQ ID NO: 15005 - RNA, 21 nt, artificial
  Oligomer
uccuguucucuggauugaucg

SEQ ID NO: 15006 - RNA, 21 nt, artificial
  Oligomer
uuaaaugcacuggaaagagga

SEQ ID NO: 15007 - RNA, 21 nt, artificial
  Oligomer
auguacacauagugcuggcug

SEQ ID NO: 15008 - RNA, 21 nt, artificial
  Oligomer
auaguugggcucagggucuuc

SEQ ID NO: 15009 - RNA, 21 nt, artificial
  Oligomer
guacucuugccaucuuugggc

SEQ ID NO: 15010 - RNA, 21 nt, artificial
  Oligomer
ucuuugggcaucaaguauguc

SEQ ID NO: 15011 - RNA, 21 nt, artificial
  Oligomer
uuugggcaucaaguaugucuc

SEQ ID NO: 15012 - RNA, 21 nt, artificial
  Oligomer
caccuugaagaagucgaggag

SEQ ID NO: 15013 - RNA, 21 nt, artificial
  Oligomer
augauccuguucucuggauug

SEQ ID NO: 15014 - RNA, 21 nt, artificial
  Oligomer
aacacguauguacaggcacgg

SEQ ID NO: 15015 - RNA, 21 nt, artificial
  Oligomer
aaguagccugugacgucgucu

SEQ ID NO: 15016 - RNA, 21 nt, artificial
  Oligomer
auccagccucgcuuugcuuuc

SEQ ID NO: 15017 - RNA, 21 nt, artificial
  Oligomer
agccucgcuuugcuuucaucu

SEQ ID NO: 15018 - RNA, 21 nt, artificial
  Oligomer
uugcuuucaucugacagaacc

SEQ ID NO: 15019 - RNA, 21 nt, artificial
  Oligomer
aggaacauguacacauagugc

SEQ ID NO: 15020 - RNA, 21 nt, artificial
  Oligomer
gaacauguacacauagugcug

SEQ ID NO: 15021 - RNA, 21 nt, artificial
  Oligomer
aacauguacacauagugcugg

SEQ ID NO: 15022 - RNA, 21 nt, artificial
  Oligomer
uagccugugacgucgucuuuc

SEQ ID NO: 15023 - RNA, 21 nt, artificial
  Oligomer
ugcuuucaucugacagaacca

SEQ ID NO: 15024 - RNA, 21 nt, artificial
  Oligomer
ggcuuuuuugucugguugucc

SEQ ID NO: 15025 - RNA, 21 nt, artificial
  Oligomer
accuugaagaagucgaggagg

SEQ ID NO: 15026 - RNA, 21 nt, artificial
  Oligomer
acgucuugcccugacuuuugc

SEQ ID NO: 15027 - RNA, 21 nt, artificial
  Oligomer
uacucuugccaucuuugggca

SEQ ID NO: 15028 - RNA, 21 nt, artificial
  Oligomer
cuugaagaagucgaggaggug

SEQ ID NO: 15029 - RNA, 21 nt, artificial
  Oligomer
aguacucgguaagugugcccu

SEQ ID NO: 15030 - RNA, 21 nt, artificial
  Oligomer
agggaacauuucuuuuaaggu

SEQ ID NO: 15031 - RNA, 21 nt, artificial
  Oligomer
uauggcucaccugcauaguug

SEQ ID NO: 15032 - RNA, 21 nt, artificial
  Oligomer
augugacggaugaaggugucc

SEQ ID NO: 15033 - RNA, 21 nt, artificial
  Oligomer
cucaauagggaacauuucuuu

SEQ ID NO: 15034 - RNA, 21 nt, artificial
  Oligomer
acauguacacauagugcuggc

SEQ ID NO: 15035 - RNA, 21 nt, artificial
  Oligomer
uacauggacgggaaguagccu

SEQ ID NO: 15036 - RNA, 21 nt, artificial
  Oligomer
acgucgucuuuccugaugacc

SEQ ID NO: 15037 - RNA, 21 nt, artificial
  Oligomer
ucaccugcauaguugggcuca

SEQ ID NO: 15038 - RNA, 21 nt, artificial
  Oligomer
cuuucaucugacagaaccacc

SEQ ID NO: 15039 - RNA, 21 nt, artificial
  Oligomer
gggcaucaaguaugucucugg

SEQ ID NO: 15040 - RNA, 21 nt, artificial
  Oligomer
ggcaucaaguaugucucuggc

SEQ ID NO: 15041 - RNA, 21 nt, artificial
  Oligomer
cuuaaaugcacuggaaagagg

SEQ ID NO: 15042 - RNA, 21 nt, artificial
  Oligomer
ugacuuuugcagguacaugga

SEQ ID NO: 15043 - RNA, 21 nt, artificial
  Oligomer
ucuugcccugacuuuugcagg

SEQ ID NO: 15044 - RNA, 21 nt, artificial
  Oligomer
cugacuuuugcagguacaugg

SEQ ID NO: 15045 - RNA, 21 nt, artificial
  Oligomer
ucgucuuuccugaugacccac

SEQ ID NO: 15046 - RNA, 21 nt, artificial
  Oligomer
cuugugaaugaccucaacagc

SEQ ID NO: 15047 - RNA, 21 nt, artificial
  Oligomer
cauguacacauagugcuggcu

SEQ ID NO: 15048 - RNA, 21 nt, artificial
  Oligomer
uguacacauagugcuggcugg

SEQ ID NO: 15049 - RNA, 21 nt, artificial
  Oligomer
uccaggagcuugugaaugacc

SEQ ID NO: 15050 - RNA, 21 nt, artificial
  Oligomer
uugugaaugaccucaacagcu

SEQ ID NO: 15051 - RNA, 21 nt, artificial
  Oligomer
gugaaugaccucaacagcuuc

SEQ ID NO: 15052 - RNA, 21 nt, artificial
  Oligomer
guccaggagcuugugaaugac

SEQ ID NO: 15053 - RNA, 21 nt, artificial
  Oligomer
gaugugacggaugaagguguc

SEQ ID NO: 15054 - RNA, 21 nt, artificial
  Oligomer
caggagcuugugaaugaccuc

SEQ ID NO: 15055 - RNA, 19 nt, artificial
  Oligomer
gcccuaaugaugcuguguc

SEQ ID NO: 15056 - RNA, 19 nt, artificial
  Oligomer
ggagaucagcccuaaugau

SEQ ID NO: 15057 - RNA, 19 nt, artificial
  Oligomer
gggaggugcuacacaaugu

SEQ ID NO: 15058 - RNA, 19 nt, artificial
  Oligomer
aggaggcucugucugacuu

SEQ ID NO: 15059 - RNA, 19 nt, artificial
  Oligomer
cuaaugaugcuguguccau

SEQ ID NO: 15060 - RNA, 19 nt, artificial
  Oligomer
cccuaaugaugcugugucc

SEQ ID NO: 15061 - RNA, 19 nt, artificial
  Oligomer
ggagcaaguuggcaaacag

SEQ ID NO: 15062 - RNA, 19 nt, artificial
  Oligomer
ggaggugcuacacaaugug

SEQ ID NO: 15063 - RNA, 19 nt, artificial
  Oligomer
augaugcuguguccaugau

SEQ ID NO: 15064 - RNA, 19 nt, artificial
  Oligomer
gaggcucugucugacuucu

SEQ ID NO: 15065 - RNA, 19 nt, artificial
  Oligomer
cugggaggugcuacacaau

SEQ ID NO: 15066 - RNA, 19 nt, artificial
  Oligomer
uggagcaaguuggcaaaca

SEQ ID NO: 15067 - RNA, 19 nt, artificial
  Oligomer
gguggagcaaguuggcaaa

SEQ ID NO: 15068 - RNA, 19 nt, artificial
  Oligomer
guguccaugaugcuuuuaa

SEQ ID NO: 15069 - RNA, 19 nt, artificial
  Oligomer
uguccaugaugcuuuuaau

SEQ ID NO: 15070 - RNA, 19 nt, artificial
  Oligomer
guccaugaugcuuuuaaua

SEQ ID NO: 15071 - RNA, 19 nt, artificial
  Oligomer
agguggagcaaguuggcaa

SEQ ID NO: 15072 - RNA, 19 nt, artificial
  Oligomer
cuguguccaugaugcuuuu

SEQ ID NO: 15073 - RNA, 19 nt, artificial
  Oligomer
gcuguguccaugaugcuuu

SEQ ID NO: 15074 - RNA, 19 nt, artificial
  Oligomer
ugaccaaggacaccugcau

SEQ ID NO: 15075 - RNA, 19 nt, artificial
  Oligomer
gcauuugaccaagccguga

SEQ ID NO: 15076 - RNA, 19 nt, artificial
  Oligomer
cagcccuaaugaugcugug

SEQ ID NO: 15077 - RNA, 19 nt, artificial
  Oligomer
ucagcccuaaugaugcugu

SEQ ID NO: 15078 - RNA, 19 nt, artificial
  Oligomer
gggagaucagcccuaauga

SEQ ID NO: 15079 - RNA, 19 nt, artificial
  Oligomer
acuuccagcuggcaagguu

SEQ ID NO: 15080 - RNA, 19 nt, artificial
  Oligomer
agggagaucagcccuaaug

SEQ ID NO: 15081 - RNA, 19 nt, artificial
  Oligomer
ugggcaacucaguuaccua

SEQ ID NO: 15082 - RNA, 19 nt, artificial
  Oligomer
gggcaacucaguuaccuag

SEQ ID NO: 15083 - RNA, 19 nt, artificial
  Oligomer
agcuugggcaacucaguua

SEQ ID NO: 15084 - RNA, 19 nt, artificial
  Oligomer
ccaggucccuaaucaugga

SEQ ID NO: 15085 - RNA, 19 nt, artificial
  Oligomer
cagggagaucagcccuaau

SEQ ID NO: 15086 - RNA, 19 nt, artificial
  Oligomer
gcaacucaguuaccuagcc

SEQ ID NO: 15087 - RNA, 19 nt, artificial
  Oligomer
caugaugccaggucccuaa

SEQ ID NO: 15088 - RNA, 19 nt, artificial
  Oligomer
ugcuacacaauguggcguc

SEQ ID NO: 15089 - RNA, 19 nt, artificial
  Oligomer
gcuugggcaacucaguuac

SEQ ID NO: 15090 - RNA, 19 nt, artificial
  Oligomer
gcaaguuggcaaacaggcu

SEQ ID NO: 15091 - RNA, 19 nt, artificial
  Oligomer
ggucccuaaucauggacuc

SEQ ID NO: 15092 - RNA, 19 nt, artificial
  Oligomer
aggucccuaaucauggacu

SEQ ID NO: 15093 - RNA, 19 nt, artificial
  Oligomer
gacacagcaucauuagggc

SEQ ID NO: 15094 - RNA, 19 nt, artificial
  Oligomer
aucauuagggcugaucucc

SEQ ID NO: 15095 - RNA, 19 nt, artificial
  Oligomer
acauuguguagcaccuccc

SEQ ID NO: 15096 - RNA, 19 nt, artificial
  Oligomer
aagucagacagagccuccu

SEQ ID NO: 15097 - RNA, 19 nt, artificial
  Oligomer
auggacacagcaucauuag

SEQ ID NO: 15098 - RNA, 19 nt, artificial
  Oligomer
ggacacagcaucauuaggg

SEQ ID NO: 15099 - RNA, 19 nt, artificial
  Oligomer
cuguuugccaacuugcucc

SEQ ID NO: 15100 - RNA, 19 nt, artificial
  Oligomer
cacauuguguagcaccucc

SEQ ID NO: 15101 - RNA, 19 nt, artificial
  Oligomer
aucauggacacagcaucau

SEQ ID NO: 15102 - RNA, 19 nt, artificial
  Oligomer
agaagucagacagagccuc

SEQ ID NO: 15103 - RNA, 19 nt, artificial
  Oligomer
auuguguagcaccucccag

SEQ ID NO: 15104 - RNA, 19 nt, artificial
  Oligomer
uguuugccaacuugcucca

SEQ ID NO: 15105 - RNA, 19 nt, artificial
  Oligomer
uuugccaacuugcuccacc

SEQ ID NO: 15106 - RNA, 19 nt, artificial
  Oligomer
uuaaaagcaucauggacac

SEQ ID NO: 15107 - RNA, 19 nt, artificial
  Oligomer
auuaaaagcaucauggaca

SEQ ID NO: 15108 - RNA, 19 nt, artificial
  Oligomer
uauuaaaagcaucauggac

SEQ ID NO: 15109 - RNA, 19 nt, artificial
  Oligomer
uugccaacuugcuccaccu

SEQ ID NO: 15110 - RNA, 19 nt, artificial
  Oligomer
aaaagcaucauggacacag

SEQ ID NO: 15111 - RNA, 19 nt, artificial
  Oligomer
aaagcaucauggacacagc

SEQ ID NO: 15112 - RNA, 19 nt, artificial
  Oligomer
augcagguguccuugguca

SEQ ID NO: 15113 - RNA, 19 nt, artificial
  Oligomer
ucacggcuuggucaaaugc

SEQ ID NO: 15114 - RNA, 19 nt, artificial
  Oligomer
cacagcaucauuagggcug

SEQ ID NO: 15115 - RNA, 19 nt, artificial
  Oligomer
acagcaucauuagggcuga

SEQ ID NO: 15116 - RNA, 19 nt, artificial
  Oligomer
ucauuagggcugaucuccc

SEQ ID NO: 15117 - RNA, 19 nt, artificial
  Oligomer
aaccuugccagcuggaagu

SEQ ID NO: 15118 - RNA, 19 nt, artificial
  Oligomer
cauuagggcugaucucccu

SEQ ID NO: 15119 - RNA, 19 nt, artificial
  Oligomer
uagguaacugaguugccca

SEQ ID NO: 15120 - RNA, 19 nt, artificial
  Oligomer
cuagguaacugaguugccc

SEQ ID NO: 15121 - RNA, 19 nt, artificial
  Oligomer
uaacugaguugcccaagcu

SEQ ID NO: 15122 - RNA, 19 nt, artificial
  Oligomer
uccaugauuagggaccugg

SEQ ID NO: 15123 - RNA, 19 nt, artificial
  Oligomer
auuagggcugaucucccug

SEQ ID NO: 15124 - RNA, 19 nt, artificial
  Oligomer
ggcuagguaacugaguugc

SEQ ID NO: 15125 - RNA, 19 nt, artificial
  Oligomer
uuagggaccuggcaucaug

SEQ ID NO: 15126 - RNA, 19 nt, artificial
  Oligomer
gacgccacauuguguagca

SEQ ID NO: 15127 - RNA, 19 nt, artificial
  Oligomer
guaacugaguugcccaagc

SEQ ID NO: 15128 - RNA, 19 nt, artificial
  Oligomer
agccuguuugccaacuugc

SEQ ID NO: 15129 - RNA, 19 nt, artificial
  Oligomer
gaguccaugauuagggacc

SEQ ID NO: 15130 - RNA, 19 nt, artificial
  Oligomer
aguccaugauuagggaccu

SEQ ID NO: 15131 - RNA, 21 nt, artificial
  Oligomer
cccuaaugaugcuguguccau

SEQ ID NO: 15132 - RNA, 21 nt, artificial
  Oligomer
cuaaugaugcuguguccauga

SEQ ID NO: 15133 - RNA, 21 nt, artificial
  Oligomer
gcccuaaugaugcugugucca

SEQ ID NO: 15134 - RNA, 21 nt, artificial
  Oligomer
ugggaggugcuacacaaugug

SEQ ID NO: 15135 - RNA, 21 nt, artificial
  Oligomer
guguccaugaugcuuuuaaua

SEQ ID NO: 15136 - RNA, 21 nt, artificial
  Oligomer
guggagcaaguuggcaaacag

SEQ ID NO: 15137 - RNA, 21 nt, artificial
  Oligomer
cagguggagcaaguuggcaaa

SEQ ID NO: 15138 - RNA, 21 nt, artificial
  Oligomer
uguguccaugaugcuuuuaau

SEQ ID NO: 15139 - RNA, 21 nt, artificial
  Oligomer
gcuguguccaugaugcuuuua

SEQ ID NO: 15140 - RNA, 21 nt, artificial
  Oligomer
cuguguccaugaugcuuuuaa

SEQ ID NO: 15141 - RNA, 21 nt, artificial
  Oligomer
ccaugaugccaggucccuaau

SEQ ID NO: 15142 - RNA, 21 nt, artificial
  Oligomer
agcagggagaucagcccuaau

SEQ ID NO: 15143 - RNA, 21 nt, artificial
  Oligomer
caacuuccagcuggcaagguu

SEQ ID NO: 15144 - RNA, 21 nt, artificial
  Oligomer
ccagcuugggcaacucaguua

SEQ ID NO: 15145 - RNA, 21 nt, artificial
  Oligomer
cuugggcaacucaguuaccua

SEQ ID NO: 15146 - RNA, 21 nt, artificial
  Oligomer
ugaugccaggucccuaaucau

SEQ ID NO: 15147 - RNA, 21 nt, artificial
  Oligomer
ucagcccuaaugaugcugugu

SEQ ID NO: 15148 - RNA, 21 nt, artificial
  Oligomer
gggagaucagcccuaaugaug

SEQ ID NO: 15149 - RNA, 21 nt, artificial
  Oligomer
agggagaucagcccuaaugau

SEQ ID NO: 15150 - RNA, 21 nt, artificial
  Oligomer
cagggagaucagcccuaauga

SEQ ID NO: 15151 - RNA, 21 nt, artificial
  Oligomer
caggucccuaaucauggacuc

SEQ ID NO: 15152 - RNA, 21 nt, artificial
  Oligomer
ccaggucccuaaucauggacu

SEQ ID NO: 15153 - RNA, 21 nt, artificial
  Oligomer
ugcuguguccaugaugcuuuu

SEQ ID NO: 15154 - RNA, 21 nt, artificial
  Oligomer
cagcuugggcaacucaguuac

SEQ ID NO: 15155 - RNA, 21 nt, artificial
  Oligomer
ugaugcuguguccaugaugcu

SEQ ID NO: 15156 - RNA, 21 nt, artificial
  Oligomer
accaugaugccaggucccuaa

SEQ ID NO: 15157 - RNA, 21 nt, artificial
  Oligomer
auggacacagcaucauuaggg

SEQ ID NO: 15158 - RNA, 21 nt, artificial
  Oligomer
ucauggacacagcaucauuag

SEQ ID NO: 15159 - RNA, 21 nt, artificial
  Oligomer
uggacacagcaucauuagggc

SEQ ID NO: 15160 - RNA, 21 nt, artificial
  Oligomer
cacauuguguagcaccuccca

SEQ ID NO: 15161 - RNA, 21 nt, artificial
  Oligomer
uauuaaaagcaucauggacac

SEQ ID NO: 15162 - RNA, 21 nt, artificial
  Oligomer
cuguuugccaacuugcuccac

SEQ ID NO: 15163 - RNA, 21 nt, artificial
  Oligomer
uuugccaacuugcuccaccug

SEQ ID NO: 15164 - RNA, 21 nt, artificial
  Oligomer
auuaaaagcaucauggacaca

SEQ ID NO: 15165 - RNA, 21 nt, artificial
  Oligomer
uaaaagcaucauggacacagc

SEQ ID NO: 15166 - RNA, 21 nt, artificial
  Oligomer
uuaaaagcaucauggacacag

SEQ ID NO: 15167 - RNA, 21 nt, artificial
  Oligomer
auuagggaccuggcaucaugg

SEQ ID NO: 15168 - RNA, 21 nt, artificial
  Oligomer
auuagggcugaucucccugcu

SEQ ID NO: 15169 - RNA, 21 nt, artificial
  Oligomer
aaccuugccagcuggaaguug

SEQ ID NO: 15170 - RNA, 21 nt, artificial
  Oligomer
uaacugaguugcccaagcugg

SEQ ID NO: 15171 - RNA, 21 nt, artificial
  Oligomer
uagguaacugaguugcccaag

SEQ ID NO: 15172 - RNA, 21 nt, artificial
  Oligomer
augauuagggaccuggcauca

SEQ ID NO: 15173 - RNA, 21 nt, artificial
  Oligomer
acacagcaucauuagggcuga

SEQ ID NO: 15174 - RNA, 21 nt, artificial
  Oligomer
caucauuagggcugaucuccc

SEQ ID NO: 15175 - RNA, 21 nt, artificial
  Oligomer
aucauuagggcugaucucccu

SEQ ID NO: 15176 - RNA, 21 nt, artificial
  Oligomer
ucauuagggcugaucucccug

SEQ ID NO: 15177 - RNA, 21 nt, artificial
  Oligomer
gaguccaugauuagggaccug

SEQ ID NO: 15178 - RNA, 21 nt, artificial
  Oligomer
aguccaugauuagggaccugg

SEQ ID NO: 15179 - RNA, 21 nt, artificial
  Oligomer
aaaagcaucauggacacagca

SEQ ID NO: 15180 - RNA, 21 nt, artificial
  Oligomer
guaacugaguugcccaagcug

SEQ ID NO: 15181 - RNA, 21 nt, artificial
  Oligomer
agcaucauggacacagcauca

SEQ ID NO: 15182 - RNA, 21 nt, artificial
  Oligomer
uuagggaccuggcaucauggu

SEQ ID NO: 15183 - RNA, 19 nt, artificial
  Oligomer
cccugcaacuaccuugaac

SEQ ID NO: 15184 - RNA, 19 nt, artificial
  Oligomer
ggaaagugaaaaagcugau

SEQ ID NO: 15185 - RNA, 19 nt, artificial
  Oligomer
gugaaaaacuacugccuga

SEQ ID NO: 15186 - RNA, 19 nt, artificial
  Oligomer
gcauuugcaacacugagaa

SEQ ID NO: 15187 - RNA, 19 nt, artificial
  Oligomer
ccuuauagguuacucauaa

SEQ ID NO: 15188 - RNA, 19 nt, artificial
  Oligomer
ccaaggaguaaguacaaau

SEQ ID NO: 15189 - RNA, 19 nt, artificial
  Oligomer
ucaaaggugaaugaagaau

SEQ ID NO: 15190 - RNA, 19 nt, artificial
  Oligomer
acccaaggaaagugaaaaa

SEQ ID NO: 15191 - RNA, 19 nt, artificial
  Oligomer
gaaaaacuacugccugacu

SEQ ID NO: 15192 - RNA, 19 nt, artificial
  Oligomer
ccuuaaagaagccuugauu

SEQ ID NO: 15193 - RNA, 19 nt, artificial
  Oligomer
cgcaacuacagauuuggaa

SEQ ID NO: 15194 - RNA, 19 nt, artificial
  Oligomer
ccaaaguuuuuguugaaga

SEQ ID NO: 15195 - RNA, 19 nt, artificial
  Oligomer
gcuuuccagaugaacccaa

SEQ ID NO: 15196 - RNA, 19 nt, artificial
  Oligomer
aggugaaaaacuacugccu

SEQ ID NO: 15197 - RNA, 19 nt, artificial
  Oligomer
ucccugcaacuaccuugaa

SEQ ID NO: 15198 - RNA, 19 nt, artificial
  Oligomer
ucauguucaacgggcagaa

SEQ ID NO: 15199 - RNA, 19 nt, artificial
  Oligomer
accuuaaagaagccuugau

SEQ ID NO: 15200 - RNA, 19 nt, artificial
  Oligomer
ccagacagagaaauaugau

SEQ ID NO: 15201 - RNA, 19 nt, artificial
  Oligomer
uguacacuauccugaagaa

SEQ ID NO: 15202 - RNA, 19 nt, artificial
  Oligomer
gguguuaucaaaggugaau

SEQ ID NO: 15203 - RNA, 19 nt, artificial
  Oligomer
ugaugcuaauaaccagaca

SEQ ID NO: 15204 - RNA, 19 nt, artificial
  Oligomer
cccaaggaaagugaaaaag

SEQ ID NO: 15205 - RNA, 19 nt, artificial
  Oligomer
ggccaggugaaaaacuacu

SEQ ID NO: 15206 - RNA, 19 nt, artificial
  Oligomer
acacugagaaguuaucuua

SEQ ID NO: 15207 - RNA, 19 nt, artificial
  Oligomer
acauugucuuugucuugaa

SEQ ID NO: 15208 - RNA, 19 nt, artificial
  Oligomer
ucgaccaaaugagagacaa

SEQ ID NO: 15209 - RNA, 19 nt, artificial
  Oligomer
ggcugcauguacacuaucc

SEQ ID NO: 15210 - RNA, 19 nt, artificial
  Oligomer
cggacaagaaggacuggaa

SEQ ID NO: 15211 - RNA, 19 nt, artificial
  Oligomer
gguuacucauaaggcauau

SEQ ID NO: 15212 - RNA, 19 nt, artificial
  Oligomer
ucacacuguaaacauucau

SEQ ID NO: 15213 - RNA, 19 nt, artificial
  Oligomer
cuagacaaugaugugagua

SEQ ID NO: 15214 - RNA, 19 nt, artificial
  Oligomer
agaaaaugaagcccuauua

SEQ ID NO: 15215 - RNA, 19 nt, artificial
  Oligomer
cccaaaguuuuuguugaag

SEQ ID NO: 15216 - RNA, 19 nt, artificial
  Oligomer
ggaggcacucuucaguuau

SEQ ID NO: 15217 - RNA, 19 nt, artificial
  Oligomer
gaagacagcaugaaggaug

SEQ ID NO: 15218 - RNA, 19 nt, artificial
  Oligomer
cacucaaggugcacuacaa

SEQ ID NO: 15219 - RNA, 19 nt, artificial
  Oligomer
agacaaaagaagagcucca

SEQ ID NO: 15220 - RNA, 19 nt, artificial
  Oligomer
cgaccaaaugagagacaag

SEQ ID NO: 15221 - RNA, 19 nt, artificial
  Oligomer
ugauucagcuucgagggaa

SEQ ID NO: 15222 - RNA, 19 nt, artificial
  Oligomer
cagacagagaaauaugauu

SEQ ID NO: 15223 - RNA, 19 nt, artificial
  Oligomer
gaagcauuaaccgagacaa

SEQ ID NO: 15224 - RNA, 19 nt, artificial
  Oligomer
gcugcauguacacuauccu

SEQ ID NO: 15225 - RNA, 19 nt, artificial
  Oligomer
agguuacucauaaggcaua

SEQ ID NO: 15226 - RNA, 19 nt, artificial
  Oligomer
ugaugugaguacccaggau

SEQ ID NO: 15227 - RNA, 19 nt, artificial
  Oligomer
guauacuguacugagacau

SEQ ID NO: 15228 - RNA, 19 nt, artificial
  Oligomer
gaugcuaauaaccagacaa

SEQ ID NO: 15229 - RNA, 19 nt, artificial
  Oligomer
gccugagacaaaagaagag

SEQ ID NO: 15230 - RNA, 19 nt, artificial
  Oligomer
agagaaauaugauuuggcu

SEQ ID NO: 15231 - RNA, 19 nt, artificial
  Oligomer
ccagaagcauuaaccgaga

SEQ ID NO: 15232 - RNA, 19 nt, artificial
  Oligomer
ggccuccuaguuucuaccu

SEQ ID NO: 15233 - RNA, 19 nt, artificial
  Oligomer
cauucaucaagcuguacau

SEQ ID NO: 15234 - RNA, 19 nt, artificial
  Oligomer
acacuguaaacauucauca

SEQ ID NO: 15235 - RNA, 19 nt, artificial
  Oligomer
acaaugaugugaguaccca

SEQ ID NO: 15236 - RNA, 19 nt, artificial
  Oligomer
uaaccuacuagacaaugau

SEQ ID NO: 15237 - RNA, 19 nt, artificial
  Oligomer
ggauguuucacaaacuaca

SEQ ID NO: 15238 - RNA, 19 nt, artificial
  Oligomer
ucggagagaagucuaggau

SEQ ID NO: 15239 - RNA, 19 nt, artificial
  Oligomer
aggcacucuucaguuauga

SEQ ID NO: 15240 - RNA, 19 nt, artificial
  Oligomer
caaggaaagugaaaaagcu

SEQ ID NO: 15241 - RNA, 19 nt, artificial
  Oligomer
ugaacccaaggaaagugaa

SEQ ID NO: 15242 - RNA, 19 nt, artificial
  Oligomer
acaaaaagaagagccuaag

SEQ ID NO: 15243 - RNA, 19 nt, artificial
  Oligomer
aacaaaaagaagagccuaa

SEQ ID NO: 15244 - RNA, 19 nt, artificial
  Oligomer
aggccagaaacaaaaagaa

SEQ ID NO: 15245 - RNA, 19 nt, artificial
  Oligomer
agcuccuccuaguuccaaa

SEQ ID NO: 15246 - RNA, 19 nt, artificial
  Oligomer
caaaagaagagcuccaggu

SEQ ID NO: 15247 - RNA, 19 nt, artificial
  Oligomer
ccgugugcuauuuggguuu

SEQ ID NO: 15248 - RNA, 19 nt, artificial
  Oligomer
ugguggaucaagacaguuu

SEQ ID NO: 15249 - RNA, 19 nt, artificial
  Oligomer
ggaauggaaaaaagcugaa

SEQ ID NO: 15250 - RNA, 19 nt, artificial
  Oligomer
cucucugcuucuuuccuuu

SEQ ID NO: 15251 - RNA, 19 nt, artificial
  Oligomer
gacagagaaauaugauuug

SEQ ID NO: 15252 - RNA, 19 nt, artificial
  Oligomer
cuaccagacagagaaauau

SEQ ID NO: 15253 - RNA, 19 nt, artificial
  Oligomer
gcauuaaccgagacaagca

SEQ ID NO: 15254 - RNA, 19 nt, artificial
  Oligomer
ugcauguacacuauccuga

SEQ ID NO: 15255 - RNA, 19 nt, artificial
  Oligomer
acaaaaacaagacacccaa

SEQ ID NO: 15256 - RNA, 19 nt, artificial
  Oligomer
acauucaucaagcuguaca

SEQ ID NO: 15257 - RNA, 19 nt, artificial
  Oligomer
cacuguaaacauucaucaa

SEQ ID NO: 15258 - RNA, 19 nt, artificial
  Oligomer
cuacuagacaaugauguga

SEQ ID NO: 15259 - RNA, 19 nt, artificial
  Oligomer
acaaagcugaagaaaauga

SEQ ID NO: 15260 - RNA, 19 nt, artificial
  Oligomer
caaaguuuuuguugaagac

SEQ ID NO: 15261 - RNA, 19 nt, artificial
  Oligomer
guguuaucaaaggugaaug

SEQ ID NO: 15262 - RNA, 19 nt, artificial
  Oligomer
cucuucaguuaugaggcua

SEQ ID NO: 15263 - RNA, 19 nt, artificial
  Oligomer
ggcuggaacacacuaagcu

SEQ ID NO: 15264 - RNA, 19 nt, artificial
  Oligomer
cacugagaaguuaucuuaa

SEQ ID NO: 15265 - RNA, 19 nt, artificial
  Oligomer
gccuaaggaagugaagcuc

SEQ ID NO: 15266 - RNA, 19 nt, artificial
  Oligomer
gaagagccuaaggaaguga

SEQ ID NO: 15267 - RNA, 19 nt, artificial
  Oligomer
agaagagccuaaggaagug

SEQ ID NO: 15268 - RNA, 19 nt, artificial
  Oligomer
ccaggccagaaacaaaaag

SEQ ID NO: 15269 - RNA, 19 nt, artificial
  Oligomer
gacaaaagaagagcuccag

SEQ ID NO: 15270 - RNA, 19 nt, artificial
  Oligomer
ggcaucugugguggaucaa

SEQ ID NO: 15271 - RNA, 19 nt, artificial
  Oligomer
gaccaaaugagagacaagu

SEQ ID NO: 15272 - RNA, 19 nt, artificial
  Oligomer
gcuguuucgaccaaaugag

SEQ ID NO: 15273 - RNA, 19 nt, artificial
  Oligomer
gacauuccaaaaucgacaa

SEQ ID NO: 15274 - RNA, 19 nt, artificial
  Oligomer
ucucucugcuucuuuccuu

SEQ ID NO: 15275 - RNA, 19 nt, artificial
  Oligomer
cucauaaggcauauacaaa

SEQ ID NO: 15276 - RNA, 19 nt, artificial
  Oligomer
guuacucauaaggcauaua

SEQ ID NO: 15277 - RNA, 19 nt, artificial
  Oligomer
cacacuguaaacauucauc

SEQ ID NO: 15278 - RNA, 19 nt, artificial
  Oligomer
accuacuagacaaugaugu

SEQ ID NO: 15279 - RNA, 19 nt, artificial
  Oligomer
gucuaggauguuucacaaa

SEQ ID NO: 15280 - RNA, 19 nt, artificial
  Oligomer
agucuaggauguuucacaa

SEQ ID NO: 15281 - RNA, 19 nt, artificial
  Oligomer
caacuacagauuuggaaag

SEQ ID NO: 15282 - RNA, 19 nt, artificial
  Oligomer
ugaaugaagaauggcugga

SEQ ID NO: 15283 - RNA, 19 nt, artificial
  Oligomer
ggugaaugaagaauggcug

SEQ ID NO: 15284 - RNA, 19 nt, artificial
  Oligomer
aggugaaugaagaauggcu

SEQ ID NO: 15285 - RNA, 19 nt, artificial
  Oligomer
ccagacaacagaaccucag

SEQ ID NO: 15286 - RNA, 19 nt, artificial
  Oligomer
gaaagugaaaaagcugaug

SEQ ID NO: 15287 - RNA, 19 nt, artificial
  Oligomer
gggccaggugaaaaacuac

SEQ ID NO: 15288 - RNA, 19 nt, artificial
  Oligomer
ggccagaaacaaaaagaag

SEQ ID NO: 15289 - RNA, 19 nt, artificial
  Oligomer
gcaaugauaacugggccac

SEQ ID NO: 15290 - RNA, 19 nt, artificial
  Oligomer
acauuccaaaaucgacaag

SEQ ID NO: 15291 - RNA, 19 nt, artificial
  Oligomer
agcugauagacuauaagau

SEQ ID NO: 15292 - RNA, 19 nt, artificial
  Oligomer
cuaucaaagaccuuaaaga

SEQ ID NO: 15293 - RNA, 19 nt, artificial
  Oligomer
gagaaauaugauuuggcua

SEQ ID NO: 15294 - RNA, 19 nt, artificial
  Oligomer
accagacagagaaauauga

SEQ ID NO: 15295 - RNA, 19 nt, artificial
  Oligomer
agaagcauuaaccgagaca

SEQ ID NO: 15296 - RNA, 19 nt, artificial
  Oligomer
acaugacugaagcagagaa

SEQ ID NO: 15297 - RNA, 19 nt, artificial
  Oligomer
ccuuuucucucucauggua

SEQ ID NO: 15298 - RNA, 19 nt, artificial
  Oligomer
accuaaucaugucccuggu

SEQ ID NO: 15299 - RNA, 19 nt, artificial
  Oligomer
acuguaaacauucaucaag

SEQ ID NO: 15300 - RNA, 19 nt, artificial
  Oligomer
gcccuauuacuuguuugua

SEQ ID NO: 15301 - RNA, 19 nt, artificial
  Oligomer
gcgcaacuacagauuugga

SEQ ID NO: 15302 - RNA, 19 nt, artificial
  Oligomer
ugguguuaucaaaggugaa

SEQ ID NO: 15303 - RNA, 19 nt, artificial
  Oligomer
cugguguuaucaaagguga

SEQ ID NO: 15304 - RNA, 19 nt, artificial
  Oligomer
ccugguguuaucaaaggug

SEQ ID NO: 15305 - RNA, 19 nt, artificial
  Oligomer
uaauccugguguuaucaaa

SEQ ID NO: 15306 - RNA, 19 nt, artificial
  Oligomer
aggaaagugaaaaagcuga

SEQ ID NO: 15307 - RNA, 19 nt, artificial
  Oligomer
ccaaggaaagugaaaaagc

SEQ ID NO: 15308 - RNA, 19 nt, artificial
  Oligomer
gaacacacuaagcugagcu

SEQ ID NO: 15309 - RNA, 19 nt, artificial
  Oligomer
ggaacacacuaagcugagc

SEQ ID NO: 15310 - RNA, 19 nt, artificial
  Oligomer
acugagaaguuaucuuaag

SEQ ID NO: 15311 - RNA, 19 nt, artificial
  Oligomer
aacacugagaaguuaucuu

SEQ ID NO: 15312 - RNA, 19 nt, artificial
  Oligomer
uugucuuugucuugaagaa

SEQ ID NO: 15313 - RNA, 19 nt, artificial
  Oligomer
cugagacaaaagaagagcu

SEQ ID NO: 15314 - RNA, 19 nt, artificial
  Oligomer
gguggaucaagacaguuuc

SEQ ID NO: 15315 - RNA, 19 nt, artificial
  Oligomer
gcaucugugguggaucaag

SEQ ID NO: 15316 - RNA, 19 nt, artificial
  Oligomer
cgauggagugugucuggaa

SEQ ID NO: 15317 - RNA, 19 nt, artificial
  Oligomer
gggaaccagcugauagacu

SEQ ID NO: 15318 - RNA, 19 nt, artificial
  Oligomer
acagagaaauaugauuugg

SEQ ID NO: 15319 - RNA, 19 nt, artificial
  Oligomer
cuacuaccagacagagaaa

SEQ ID NO: 15320 - RNA, 19 nt, artificial
  Oligomer
cugaagaacaugacugaag

SEQ ID NO: 15321 - RNA, 19 nt, artificial
  Oligomer
uccugaagaacaugacuga

SEQ ID NO: 15322 - RNA, 19 nt, artificial
  Oligomer
ggacaagaaggacuggaag

SEQ ID NO: 15323 - RNA, 19 nt, artificial
  Oligomer
uuacucauaaggcauauac

SEQ ID NO: 15324 - RNA, 19 nt, artificial
  Oligomer
gcuugaaguaaccuuauag

SEQ ID NO: 15325 - RNA, 19 nt, artificial
  Oligomer
uacuguaauuggcucuuaa

SEQ ID NO: 15326 - RNA, 19 nt, artificial
  Oligomer
uuacuguaauuggcucuua

SEQ ID NO: 15327 - RNA, 19 nt, artificial
  Oligomer
uccuguuucugaaccauua

SEQ ID NO: 15328 - RNA, 19 nt, artificial
  Oligomer
guaaguacaaauauuccug

SEQ ID NO: 15329 - RNA, 19 nt, artificial
  Oligomer
aaaccuagcaucuuacaaa

SEQ ID NO: 15330 - RNA, 19 nt, artificial
  Oligomer
ucaagcuguacauuuggug

SEQ ID NO: 15331 - RNA, 19 nt, artificial
  Oligomer
cuguaaacauucaucaagc

SEQ ID NO: 15332 - RNA, 19 nt, artificial
  Oligomer
ccuguuucuugcucugagu

SEQ ID NO: 15333 - RNA, 19 nt, artificial
  Oligomer
agagagucuuccagguacu

SEQ ID NO: 15334 - RNA, 19 nt, artificial
  Oligomer
gaaaaguggauggaagugu

SEQ ID NO: 15335 - RNA, 19 nt, artificial
  Oligomer
ugagacauuacaguuugga

SEQ ID NO: 15336 - RNA, 19 nt, artificial
  Oligomer
cugcuguauacuguacuga

SEQ ID NO: 15337 - RNA, 19 nt, artificial
  Oligomer
cccuucugcuguauacugu

SEQ ID NO: 15338 - RNA, 19 nt, artificial
  Oligomer
aagaaaaugaagcccuauu

SEQ ID NO: 15339 - RNA, 19 nt, artificial
  Oligomer
cggagagaagucuaggaug

SEQ ID NO: 15340 - RNA, 19 nt, artificial
  Oligomer
cuacagauuuggaaagcac

SEQ ID NO: 15341 - RNA, 19 nt, artificial
  Oligomer
guugaagacugcgcaacua

SEQ ID NO: 15342 - RNA, 19 nt, artificial
  Oligomer
gacaacagaaccucagcuu

SEQ ID NO: 15343 - RNA, 19 nt, artificial
  Oligomer
acacacuaagcugagcuau

SEQ ID NO: 15344 - RNA, 19 nt, artificial
  Oligomer
aacacacuaagcugagcua

SEQ ID NO: 15345 - RNA, 19 nt, artificial
  Oligomer
gagaaguuaucuuaaggga

SEQ ID NO: 15346 - RNA, 19 nt, artificial
  Oligomer
aggaagugaagcucagugu

SEQ ID NO: 15347 - RNA, 19 nt, artificial
  Oligomer
caccaggccagaaacaaaa

SEQ ID NO: 15348 - RNA, 19 nt, artificial
  Oligomer
gggaacauugucuuugucu

SEQ ID NO: 15349 - RNA, 19 nt, artificial
  Oligomer
ccagggaacauugucuuug

SEQ ID NO: 15350 - RNA, 19 nt, artificial
  Oligomer
gugugcuauuuggguuugu

SEQ ID NO: 15351 - RNA, 19 nt, artificial
  Oligomer
accgugugcuauuuggguu

SEQ ID NO: 15352 - RNA, 19 nt, artificial
  Oligomer
guaggguuaugagucaguu

SEQ ID NO: 15353 - RNA, 19 nt, artificial
  Oligomer
acuuggcaguggcuuacuu

SEQ ID NO: 15354 - RNA, 19 nt, artificial
  Oligomer
cagaagcauuaaccgagac

SEQ ID NO: 15355 - RNA, 19 nt, artificial
  Oligomer
gaacaugacugaagcagag

SEQ ID NO: 15356 - RNA, 19 nt, artificial
  Oligomer
ccugaagaacaugacugaa

SEQ ID NO: 15357 - RNA, 19 nt, artificial
  Oligomer
ggcucuuaaggcuugaagu

SEQ ID NO: 15358 - RNA, 19 nt, artificial
  Oligomer
uggcucuuaaggcuugaag

SEQ ID NO: 15359 - RNA, 19 nt, artificial
  Oligomer
aaccuagcaucuuacaaaa

SEQ ID NO: 15360 - RNA, 19 nt, artificial
  Oligomer
uguaaacauucaucaagcu

SEQ ID NO: 15361 - RNA, 19 nt, artificial
  Oligomer
gagagagucuuccagguac

SEQ ID NO: 15362 - RNA, 19 nt, artificial
  Oligomer
acgagagagucuuccaggu

SEQ ID NO: 15363 - RNA, 19 nt, artificial
  Oligomer
uggauggaagugucuggaa

SEQ ID NO: 15364 - RNA, 19 nt, artificial
  Oligomer
ggaaaaguggauggaagug

SEQ ID NO: 15365 - RNA, 19 nt, artificial
  Oligomer
gaggaaaaguggauggaag

SEQ ID NO: 15366 - RNA, 19 nt, artificial
  Oligomer
agaggaaaaguggauggaa

SEQ ID NO: 15367 - RNA, 19 nt, artificial
  Oligomer
acauuacaguuuggaagug

SEQ ID NO: 15368 - RNA, 19 nt, artificial
  Oligomer
caaccugucuucucucugu

SEQ ID NO: 15369 - RNA, 19 nt, artificial
  Oligomer
gagaagucuaggauguuuc

SEQ ID NO: 15370 - RNA, 19 nt, artificial
  Oligomer
cucggagagaagucuagga

SEQ ID NO: 15371 - RNA, 19 nt, artificial
  Oligomer
aagggaaggugggcauuuu

SEQ ID NO: 15372 - RNA, 19 nt, artificial
  Oligomer
guggaggcacucuucaguu

SEQ ID NO: 15373 - RNA, 19 nt, artificial
  Oligomer
cuggaacacacuaagcuga

SEQ ID NO: 15374 - RNA, 19 nt, artificial
  Oligomer
ccagaaacaaaaagaagag

SEQ ID NO: 15375 - RNA, 19 nt, artificial
  Oligomer
caggccagaaacaaaaaga

SEQ ID NO: 15376 - RNA, 19 nt, artificial
  Oligomer
gucuugaagaagggcaaug

SEQ ID NO: 15377 - RNA, 19 nt, artificial
  Oligomer
agggaacauugucuuuguc

SEQ ID NO: 15378 - RNA, 19 nt, artificial
  Oligomer
gccagggaacauugucuuu

SEQ ID NO: 15379 - RNA, 19 nt, artificial
  Oligomer
ugccagggaacauugucuu

SEQ ID NO: 15380 - RNA, 19 nt, artificial
  Oligomer
cgugugcuauuuggguuug

SEQ ID NO: 15381 - RNA, 19 nt, artificial
  Oligomer
ggaaaaaagcugaagaaca

SEQ ID NO: 15382 - RNA, 19 nt, artificial
  Oligomer
gcuaucaaagaccuuaaag

SEQ ID NO: 15383 - RNA, 19 nt, artificial
  Oligomer
cucuuaaggcuugaaguaa

SEQ ID NO: 15384 - RNA, 19 nt, artificial
  Oligomer
guaauuggcucuuaaggcu

SEQ ID NO: 15385 - RNA, 19 nt, artificial
  Oligomer
cugaaccauuacuguaauu

SEQ ID NO: 15386 - RNA, 19 nt, artificial
  Oligomer
cccaaggaguaaguacaaa

SEQ ID NO: 15387 - RNA, 19 nt, artificial
  Oligomer
uccuguuucuugcucugag

SEQ ID NO: 15388 - RNA, 19 nt, artificial
  Oligomer
ggagaggaaaaguggaugg

SEQ ID NO: 15389 - RNA, 19 nt, artificial
  Oligomer
gggagaggaaaaguggaug

SEQ ID NO: 15390 - RNA, 19 nt, artificial
  Oligomer
acaguuuggaaguguuaac

SEQ ID NO: 15391 - RNA, 19 nt, artificial
  Oligomer
agacauuacaguuuggaag

SEQ ID NO: 15392 - RNA, 19 nt, artificial
  Oligomer
gagacauuacaguuuggaa

SEQ ID NO: 15393 - RNA, 19 nt, artificial
  Oligomer
gaaaaugaagcccuauuac

SEQ ID NO: 15394 - RNA, 19 nt, artificial
  Oligomer
gcuccaaccugucuucucu

SEQ ID NO: 15395 - RNA, 19 nt, artificial
  Oligomer
cccuuucagaagacagcau

SEQ ID NO: 15396 - RNA, 19 nt, artificial
  Oligomer
gaaguuaucuuaagggagg

SEQ ID NO: 15397 - RNA, 19 nt, artificial
  Oligomer
acaaguacacgguagucau

SEQ ID NO: 15398 - RNA, 19 nt, artificial
  Oligomer
ugagaaguuaucuuaaggg

SEQ ID NO: 15399 - RNA, 19 nt, artificial
  Oligomer
accaggccagaaacaaaaa

SEQ ID NO: 15400 - RNA, 19 nt, artificial
  Oligomer
auggaaaaaagcugaagaa

SEQ ID NO: 15401 - RNA, 19 nt, artificial
  Oligomer
ggaggaauggaaaaaagcu

SEQ ID NO: 15402 - RNA, 19 nt, artificial
  Oligomer
ucccggauuugcuucaaca

SEQ ID NO: 15403 - RNA, 19 nt, artificial
  Oligomer
cucccggauuugcuucaac

SEQ ID NO: 15404 - RNA, 19 nt, artificial
  Oligomer
acucccggauuugcuucaa

SEQ ID NO: 15405 - RNA, 19 nt, artificial
  Oligomer
uuggcucuuaaggcuugaa

SEQ ID NO: 15406 - RNA, 19 nt, artificial
  Oligomer
ugauccuguuucuugcucu

SEQ ID NO: 15407 - RNA, 19 nt, artificial
  Oligomer
gguacugauccuguuucuu

SEQ ID NO: 15408 - RNA, 19 nt, artificial
  Oligomer
gagaggaaaaguggaugga

SEQ ID NO: 15409 - RNA, 19 nt, artificial
  Oligomer
ccuucugcuguauacugua

SEQ ID NO: 15410 - RNA, 19 nt, artificial
  Oligomer
ccaaccugucuucucucug

SEQ ID NO: 15411 - RNA, 19 nt, artificial
  Oligomer
uccaaccugucuucucucu

SEQ ID NO: 15412 - RNA, 19 nt, artificial
  Oligomer
agcccuauuacuuguuugu

SEQ ID NO: 15413 - RNA, 19 nt, artificial
  Oligomer
auauaauccugguguuauc

SEQ ID NO: 15414 - RNA, 19 nt, artificial
  Oligomer
agacaacagaaccucagcu

SEQ ID NO: 15415 - RNA, 19 nt, artificial
  Oligomer
ugaaaaagcugaugcuaau

SEQ ID NO: 15416 - RNA, 19 nt, artificial
  Oligomer
ccaugcccuacacacucaa

SEQ ID NO: 15417 - RNA, 19 nt, artificial
  Oligomer
uggagugugucuggaagca

SEQ ID NO: 15418 - RNA, 19 nt, artificial
  Oligomer
ugagucaguugccaaaagg

SEQ ID NO: 15419 - RNA, 19 nt, artificial
  Oligomer
gcugauagacuauaagauc

SEQ ID NO: 15420 - RNA, 19 nt, artificial
  Oligomer
cuguuucugaaccauuacu

SEQ ID NO: 15421 - RNA, 19 nt, artificial
  Oligomer
cugauccuguuucuugcuc

SEQ ID NO: 15422 - RNA, 19 nt, artificial
  Oligomer
caguuuggaaguguuaacu

SEQ ID NO: 15423 - RNA, 19 nt, artificial
  Oligomer
gggacauggugucuaagaa

SEQ ID NO: 15424 - RNA, 19 nt, artificial
  Oligomer
gccagaaacaaaaagaaga

SEQ ID NO: 15425 - RNA, 19 nt, artificial
  Oligomer
agaagggcaaugauaacug

SEQ ID NO: 15426 - RNA, 19 nt, artificial
  Oligomer
cuauuuggguuugugccug

SEQ ID NO: 15427 - RNA, 19 nt, artificial
  Oligomer
gaauggaaaaaagcugaag

SEQ ID NO: 15428 - RNA, 19 nt, artificial
  Oligomer
gguaggguuaugagucagu

SEQ ID NO: 15429 - RNA, 19 nt, artificial
  Oligomer
cucucaugguaggguuaug

SEQ ID NO: 15430 - RNA, 19 nt, artificial
  Oligomer
ucucucucaugguaggguu

SEQ ID NO: 15431 - RNA, 19 nt, artificial
  Oligomer
uuggcugcauguacacuau

SEQ ID NO: 15432 - RNA, 19 nt, artificial
  Oligomer
gcccaaggaguaaguacaa

SEQ ID NO: 15433 - RNA, 19 nt, artificial
  Oligomer
caggugaauggaggaguua

SEQ ID NO: 15434 - RNA, 19 nt, artificial
  Oligomer
caaagcugaagaaaaugaa

SEQ ID NO: 15435 - RNA, 19 nt, artificial
  Oligomer
cuucuuuccuuuucucucu

SEQ ID NO: 15436 - RNA, 19 nt, artificial
  Oligomer
gaaacaaaaagaagagccu

SEQ ID NO: 15437 - RNA, 19 nt, artificial
  Oligomer
cuaccuugaaccaguugag

SEQ ID NO: 15438 - RNA, 19 nt, artificial
  Oligomer
aggaauggaaaaaagcuga

SEQ ID NO: 15439 - RNA, 19 nt, artificial
  Oligomer
gaggaauggaaaaaagcug

SEQ ID NO: 15440 - RNA, 19 nt, artificial
  Oligomer
cucucucaugguaggguua

SEQ ID NO: 15441 - RNA, 19 nt, artificial
  Oligomer
ccuguuucugaaccauuac

SEQ ID NO: 15442 - RNA, 19 nt, artificial
  Oligomer
gguguuauauaacauugcu

SEQ ID NO: 15443 - RNA, 19 nt, artificial
  Oligomer
ugaaccauuacuguaauug

SEQ ID NO: 15444 - RNA, 19 nt, artificial
  Oligomer
gccuccuaguuucuaccua

SEQ ID NO: 15445 - RNA, 19 nt, artificial
  Oligomer
gaaaaagcugaugcuaaua

SEQ ID NO: 15446 - RNA, 19 nt, artificial
  Oligomer
gcaguggcuuacuuccaac

SEQ ID NO: 15447 - RNA, 19 nt, artificial
  Oligomer
ggcccaaggaguaaguaca

SEQ ID NO: 15448 - RNA, 19 nt, artificial
  Oligomer
ugaagaaaaugaagcccua

SEQ ID NO: 15449 - RNA, 19 nt, artificial
  Oligomer
cgguagucaugaagacuca

SEQ ID NO: 15450 - RNA, 19 nt, artificial
  Oligomer
gaaggaggaauggaaaaaa

SEQ ID NO: 15451 - RNA, 19 nt, artificial
  Oligomer
gagguguuauauaacauug

SEQ ID NO: 15452 - RNA, 19 nt, artificial
  Oligomer
accagcugauagacuauaa

SEQ ID NO: 15453 - RNA, 19 nt, artificial
  Oligomer
cuccuaguuucuaccuaau

SEQ ID NO: 15454 - RNA, 19 nt, artificial
  Oligomer
cuguacauuuggugcacuu

SEQ ID NO: 15455 - RNA, 19 nt, artificial
  Oligomer
gugaaaaagcugaugcuaa

SEQ ID NO: 15456 - RNA, 19 nt, artificial
  Oligomer
ugagaacacagugggugac

SEQ ID NO: 15457 - RNA, 19 nt, artificial
  Oligomer
ugaaaaacuacugccugac

SEQ ID NO: 15458 - RNA, 19 nt, artificial
  Oligomer
cucugcuucuuuccuuuuc

SEQ ID NO: 15459 - RNA, 19 nt, artificial
  Oligomer
agaaggaggaauggaaaaa

SEQ ID NO: 15460 - RNA, 19 nt, artificial
  Oligomer
guuugccugugagguguua

SEQ ID NO: 15461 - RNA, 19 nt, artificial
  Oligomer
ggcuaucaaagaccuuaaa

SEQ ID NO: 15462 - RNA, 19 nt, artificial
  Oligomer
caaacuacaaagcugaaga

SEQ ID NO: 15463 - RNA, 19 nt, artificial
  Oligomer
ggaccuggaguuucaggaa

SEQ ID NO: 15464 - RNA, 19 nt, artificial
  Oligomer
ggacauggugucuaagaaa

SEQ ID NO: 15465 - RNA, 19 nt, artificial
  Oligomer
uccgggacauggugucuaa

SEQ ID NO: 15466 - RNA, 19 nt, artificial
  Oligomer
acacacucaaggugcacua

SEQ ID NO: 15467 - RNA, 19 nt, artificial
  Oligomer
gcaacuaccuugaaccagu

SEQ ID NO: 15468 - RNA, 19 nt, artificial
  Oligomer
uggaagcagaagcuauaug

SEQ ID NO: 15469 - RNA, 19 nt, artificial
  Oligomer
cuggaagcagaagcuauau

SEQ ID NO: 15470 - RNA, 19 nt, artificial
  Oligomer
ccaaaaucgacaaggcgau

SEQ ID NO: 15471 - RNA, 19 nt, artificial
  Oligomer
agcccagacauuccaaaau

SEQ ID NO: 15472 - RNA, 19 nt, artificial
  Oligomer
gcuucaacauuggcugcau

SEQ ID NO: 15473 - RNA, 19 nt, artificial
  Oligomer
cuaguuucuaccuaaucau

SEQ ID NO: 15474 - RNA, 19 nt, artificial
  Oligomer
uccuaguuucuaccuaauc

SEQ ID NO: 15475 - RNA, 19 nt, artificial
  Oligomer
ccuagcaucuuacaaaaac

SEQ ID NO: 15476 - RNA, 19 nt, artificial
  Oligomer
accuagcaucuuacaaaaa

SEQ ID NO: 15477 - RNA, 19 nt, artificial
  Oligomer
cugugucauaccacaauaa

SEQ ID NO: 15478 - RNA, 19 nt, artificial
  Oligomer
gaagaaaaugaagcccuau

SEQ ID NO: 15479 - RNA, 19 nt, artificial
  Oligomer
ucacaaacuacaaagcuga

SEQ ID NO: 15480 - RNA, 19 nt, artificial
  Oligomer
gggauauaauccugguguu

SEQ ID NO: 15481 - RNA, 19 nt, artificial
  Oligomer
uccagaugaacccaaggaa

SEQ ID NO: 15482 - RNA, 19 nt, artificial
  Oligomer
gccaggugaaaaacuacug

SEQ ID NO: 15483 - RNA, 19 nt, artificial
  Oligomer
cgggacauggugucuaaga

SEQ ID NO: 15484 - RNA, 19 nt, artificial
  Oligomer
cugcuucuuuccuuuucuc

SEQ ID NO: 15485 - RNA, 19 nt, artificial
  Oligomer
ucuggaagcagaagcuaua

SEQ ID NO: 15486 - RNA, 19 nt, artificial
  Oligomer
agguguuauauaacauugc

SEQ ID NO: 15487 - RNA, 19 nt, artificial
  Oligomer
cuagcaucuuacaaaaaca

SEQ ID NO: 15488 - RNA, 19 nt, artificial
  Oligomer
cuuuccuuuucucucucau

SEQ ID NO: 15489 - RNA, 19 nt, artificial
  Oligomer
gcacuuuucugugucauac

SEQ ID NO: 15490 - RNA, 19 nt, artificial
  Oligomer
gcuguguucacacuguaaa

SEQ ID NO: 15491 - RNA, 19 nt, artificial
  Oligomer
ccugucuucucucugucuc

SEQ ID NO: 15492 - RNA, 19 nt, artificial
  Oligomer
cugaagaaaaugaagcccu

SEQ ID NO: 15493 - RNA, 19 nt, artificial
  Oligomer
acaaacuacaaagcugaag

SEQ ID NO: 15494 - RNA, 19 nt, artificial
  Oligomer
cacaaacuacaaagcugaa

SEQ ID NO: 15495 - RNA, 19 nt, artificial
  Oligomer
gcacucggagagaagucua

SEQ ID NO: 15496 - RNA, 19 nt, artificial
  Oligomer
gacugcgcaacuacagauu

SEQ ID NO: 15497 - RNA, 19 nt, artificial
  Oligomer
agacugcgcaacuacagau

SEQ ID NO: 15498 - RNA, 19 nt, artificial
  Oligomer
ccaggugaaaaacuacugc

SEQ ID NO: 15499 - RNA, 19 nt, artificial
  Oligomer
gcaacacugagaaguuauc

SEQ ID NO: 15500 - RNA, 19 nt, artificial
  Oligomer
ucugcuucuuuccuuuucu

SEQ ID NO: 15501 - RNA, 19 nt, artificial
  Oligomer
agaaggauuaccuaggcaa

SEQ ID NO: 15502 - RNA, 19 nt, artificial
  Oligomer
caagaaggauuaccuaggc

SEQ ID NO: 15503 - RNA, 19 nt, artificial
  Oligomer
gaagcuauaugagccagug

SEQ ID NO: 15504 - RNA, 19 nt, artificial
  Oligomer
agaagcuauaugagccagu

SEQ ID NO: 15505 - RNA, 19 nt, artificial
  Oligomer
gcagaagcuauaugagcca

SEQ ID NO: 15506 - RNA, 19 nt, artificial
  Oligomer
gugagguguuauauaacau

SEQ ID NO: 15507 - RNA, 19 nt, artificial
  Oligomer
ccggauuugcuucaacauu

SEQ ID NO: 15508 - RNA, 19 nt, artificial
  Oligomer
cagcuguguucacacugua

SEQ ID NO: 15509 - RNA, 19 nt, artificial
  Oligomer
cccuguuaaaauuuaaccu

SEQ ID NO: 15510 - RNA, 19 nt, artificial
  Oligomer
cccuauuacuuguuuguaa

SEQ ID NO: 15511 - RNA, 19 nt, artificial
  Oligomer
acagcaugaaggaugccug

SEQ ID NO: 15512 - RNA, 19 nt, artificial
  Oligomer
guacacgguagucaugaag

SEQ ID NO: 15513 - RNA, 19 nt, artificial
  Oligomer
aguacacgguagucaugaa

SEQ ID NO: 15514 - RNA, 19 nt, artificial
  Oligomer
agacaguuucucuggguuu

SEQ ID NO: 15515 - RNA, 19 nt, artificial
  Oligomer
agcuggccaagaaggauua

SEQ ID NO: 15516 - RNA, 19 nt, artificial
  Oligomer
uugcuuucauguaugccaa

SEQ ID NO: 15517 - RNA, 19 nt, artificial
  Oligomer
ccagcugauagacuauaag

SEQ ID NO: 15518 - RNA, 19 nt, artificial
  Oligomer
aaccagcugauagacuaua

SEQ ID NO: 15519 - RNA, 19 nt, artificial
  Oligomer
ucugugucauaccacaaua

SEQ ID NO: 15520 - RNA, 19 nt, artificial
  Oligomer
gugcacuuuucugugucau

SEQ ID NO: 15521 - RNA, 19 nt, artificial
  Oligomer
guacauuuggugcacuuuu

SEQ ID NO: 15522 - RNA, 19 nt, artificial
  Oligomer
cucuuggccuccuaguuuc

SEQ ID NO: 15523 - RNA, 19 nt, artificial
  Oligomer
uccagguacugauccuguu

SEQ ID NO: 15524 - RNA, 19 nt, artificial
  Oligomer
ucuuuccuuuucucucuca

SEQ ID NO: 15525 - RNA, 19 nt, artificial
  Oligomer
gaccuggaguuucaggaag

SEQ ID NO: 15526 - RNA, 19 nt, artificial
  Oligomer
agaaccucagcuuaagaaa

SEQ ID NO: 15527 - RNA, 19 nt, artificial
  Oligomer
agaacacagugggugacca

SEQ ID NO: 15528 - RNA, 19 nt, artificial
  Oligomer
uggugucuaagaaacugga

SEQ ID NO: 15529 - RNA, 19 nt, artificial
  Oligomer
gguuugugccugagacaaa

SEQ ID NO: 15530 - RNA, 19 nt, artificial
  Oligomer
cugaugcauuugcaacacu

SEQ ID NO: 15531 - RNA, 19 nt, artificial
  Oligomer
ggcucaccgugugcuauuu

SEQ ID NO: 15532 - RNA, 19 nt, artificial
  Oligomer
ccugaugcauuugcaacac

SEQ ID NO: 15533 - RNA, 19 nt, artificial
  Oligomer
ggccaagaaggauuaccua

SEQ ID NO: 15534 - RNA, 19 nt, artificial
  Oligomer
ugagagacaaguggcucag

SEQ ID NO: 15535 - RNA, 19 nt, artificial
  Oligomer
gacauuuccugaugcauuu

SEQ ID NO: 15536 - RNA, 19 nt, artificial
  Oligomer
ggacauuuccugaugcauu

SEQ ID NO: 15537 - RNA, 19 nt, artificial
  Oligomer
gcccagacauuccaaaauc

SEQ ID NO: 15538 - RNA, 19 nt, artificial
  Oligomer
gaagucugagcccagacau

SEQ ID NO: 15539 - RNA, 19 nt, artificial
  Oligomer
caguuagcauuggccacga

SEQ ID NO: 15540 - RNA, 19 nt, artificial
  Oligomer
gccugugagguguuauaua

SEQ ID NO: 15541 - RNA, 19 nt, artificial
  Oligomer
gaaauaugauuuggcuauc

SEQ ID NO: 15542 - RNA, 19 nt, artificial
  Oligomer
caacgagggaugcucuacu

SEQ ID NO: 15543 - RNA, 19 nt, artificial
  Oligomer
gaaguaaccuuauagguua

SEQ ID NO: 15544 - RNA, 19 nt, artificial
  Oligomer
ucugaaccauuacuguaau

SEQ ID NO: 15545 - RNA, 19 nt, artificial
  Oligomer
gugucauaccacaauaaaa

SEQ ID NO: 15546 - RNA, 19 nt, artificial
  Oligomer
cucucuuggccuccuaguu

SEQ ID NO: 15547 - RNA, 19 nt, artificial
  Oligomer
ugaagcccuauuacuuguu

SEQ ID NO: 15548 - RNA, 19 nt, artificial
  Oligomer
gcacucuucaguuaugagg

SEQ ID NO: 15549 - RNA, 19 nt, artificial
  Oligomer
cugaugcuaauaaccagac

SEQ ID NO: 15550 - RNA, 19 nt, artificial
  Oligomer
gcugaugcuaauaaccaga

SEQ ID NO: 15551 - RNA, 19 nt, artificial
  Oligomer
ccuuucagaagacagcaug

SEQ ID NO: 15552 - RNA, 19 nt, artificial
  Oligomer
uugcaacacugagaaguua

SEQ ID NO: 15553 - RNA, 19 nt, artificial
  Oligomer
ugagacaaaagaagagcuc

SEQ ID NO: 15554 - RNA, 19 nt, artificial
  Oligomer
ugaugcauuugcaacacug

SEQ ID NO: 15555 - RNA, 19 nt, artificial
  Oligomer
gugucuggaagcagaagcu

SEQ ID NO: 15556 - RNA, 19 nt, artificial
  Oligomer
ccagacauuccaaaaucga

SEQ ID NO: 15557 - RNA, 19 nt, artificial
  Oligomer
ugccugugagguguuauau

SEQ ID NO: 15558 - RNA, 19 nt, artificial
  Oligomer
ggcuccaguucaagcuguu

SEQ ID NO: 15559 - RNA, 19 nt, artificial
  Oligomer
agccuugauucagcuucga

SEQ ID NO: 15560 - RNA, 19 nt, artificial
  Oligomer
agaccuuaaagaagccuug

SEQ ID NO: 15561 - RNA, 19 nt, artificial
  Oligomer
ugcucuacuaccagacaga

SEQ ID NO: 15562 - RNA, 19 nt, artificial
  Oligomer
ccuuuaccagaagcauuaa

SEQ ID NO: 15563 - RNA, 19 nt, artificial
  Oligomer
cuauccugaagaacaugac

SEQ ID NO: 15564 - RNA, 19 nt, artificial
  Oligomer
accuuauagguuacucaua

SEQ ID NO: 15565 - RNA, 19 nt, artificial
  Oligomer
uucugugucauaccacaau

SEQ ID NO: 15566 - RNA, 19 nt, artificial
  Oligomer
ugcacuuuucugugucaua

SEQ ID NO: 15567 - RNA, 19 nt, artificial
  Oligomer
ggugcacuuuucuguguca

SEQ ID NO: 15568 - RNA, 19 nt, artificial
  Oligomer
ccagcuguguucacacugu

SEQ ID NO: 15569 - RNA, 19 nt, artificial
  Oligomer
cuaggauguuucacaaacu

SEQ ID NO: 15570 - RNA, 19 nt, artificial
  Oligomer
cccagaaagugaacaccuu

SEQ ID NO: 15571 - RNA, 19 nt, artificial
  Oligomer
uguuaucaaaggugaauga

SEQ ID NO: 15572 - RNA, 19 nt, artificial
  Oligomer
ggauauaauccugguguua

SEQ ID NO: 15573 - RNA, 19 nt, artificial
  Oligomer
ggcacucuucaguuaugag

SEQ ID NO: 15574 - RNA, 19 nt, artificial
  Oligomer
agcugaugcuaauaaccag

SEQ ID NO: 15575 - RNA, 19 nt, artificial
  Oligomer
accaaggcuuuccagauga

SEQ ID NO: 15576 - RNA, 19 nt, artificial
  Oligomer
gacauggugucuaagaaac

SEQ ID NO: 15577 - RNA, 19 nt, artificial
  Oligomer
gcacuacaaguacacggua

SEQ ID NO: 15578 - RNA, 19 nt, artificial
  Oligomer
ccuacacacucaaggugca

SEQ ID NO: 15579 - RNA, 19 nt, artificial
  Oligomer
gcuccuccuaguuccaaag

SEQ ID NO: 15580 - RNA, 19 nt, artificial
  Oligomer
ugcaacacugagaaguuau

SEQ ID NO: 15581 - RNA, 19 nt, artificial
  Oligomer
aagacaguuucucuggguu

SEQ ID NO: 15582 - RNA, 19 nt, artificial
  Oligomer
ccaagaaggauuaccuagg

SEQ ID NO: 15583 - RNA, 19 nt, artificial
  Oligomer
ccaaaugagagacaagugg

SEQ ID NO: 15584 - RNA, 19 nt, artificial
  Oligomer
aaaagcugaagaacaguua

SEQ ID NO: 15585 - RNA, 19 nt, artificial
  Oligomer
uuaugagucaguugccaaa

SEQ ID NO: 15586 - RNA, 19 nt, artificial
  Oligomer
uugccugugagguguuaua

SEQ ID NO: 15587 - RNA, 19 nt, artificial
  Oligomer
gccuugauucagcuucgag

SEQ ID NO: 15588 - RNA, 19 nt, artificial
  Oligomer
ugugucauaccacaauaaa

SEQ ID NO: 15589 - RNA, 19 nt, artificial
  Oligomer
agcuguguucacacuguaa

SEQ ID NO: 15590 - RNA, 19 nt, artificial
  Oligomer
ccagguacugauccuguuu

SEQ ID NO: 15591 - RNA, 19 nt, artificial
  Oligomer
agacgcuccaaccugucuu

SEQ ID NO: 15592 - RNA, 19 nt, artificial
  Oligomer
ucaguuaugaggcuaccca

SEQ ID NO: 15593 - RNA, 19 nt, artificial
  Oligomer
ugaccaaggcuuuccagau

SEQ ID NO: 15594 - RNA, 19 nt, artificial
  Oligomer
uccggcuggaacacacuaa

SEQ ID NO: 15595 - RNA, 19 nt, artificial
  Oligomer
agccuaaggaagugaagcu

SEQ ID NO: 15596 - RNA, 19 nt, artificial
  Oligomer
ccuugaaccaguugagcug

SEQ ID NO: 15597 - RNA, 19 nt, artificial
  Oligomer
caagacaguuucucugggu

SEQ ID NO: 15598 - RNA, 19 nt, artificial
  Oligomer
uccugaugcauuugcaaca

SEQ ID NO: 15599 - RNA, 19 nt, artificial
  Oligomer
ggaucaagacaguuucucu

SEQ ID NO: 15600 - RNA, 19 nt, artificial
  Oligomer
agagacaaguggcucagcu

SEQ ID NO: 15601 - RNA, 19 nt, artificial
  Oligomer
cugaagaacaguuagcauu

SEQ ID NO: 15602 - RNA, 19 nt, artificial
  Oligomer
aaaaagcugaagaacaguu

SEQ ID NO: 15603 - RNA, 19 nt, artificial
  Oligomer
cuuucauguaugccaagaa

SEQ ID NO: 15604 - RNA, 19 nt, artificial
  Oligomer
acauugcuuucauguaugc

SEQ ID NO: 15605 - RNA, 19 nt, artificial
  Oligomer
ugugagguguuauauaaca

SEQ ID NO: 15606 - RNA, 19 nt, artificial
  Oligomer
cuccaguucaagcuguuug

SEQ ID NO: 15607 - RNA, 19 nt, artificial
  Oligomer
gaaccagcugauagacuau

SEQ ID NO: 15608 - RNA, 19 nt, artificial
  Oligomer
gaagccuugauucagcuuc

SEQ ID NO: 15609 - RNA, 19 nt, artificial
  Oligomer
agaagccuugauucagcuu

SEQ ID NO: 15610 - RNA, 19 nt, artificial
  Oligomer
ggaugcucuacuaccagac

SEQ ID NO: 15611 - RNA, 19 nt, artificial
  Oligomer
gggaugcucuacuaccaga

SEQ ID NO: 15612 - RNA, 19 nt, artificial
  Oligomer
guggcuuacuuccaacgag

SEQ ID NO: 15613 - RNA, 19 nt, artificial
  Oligomer
ugcuucaacauuggcugca

SEQ ID NO: 15614 - RNA, 19 nt, artificial
  Oligomer
cuuauagguuacucauaag

SEQ ID NO: 15615 - RNA, 19 nt, artificial
  Oligomer
aggcuugaaguaaccuuau

SEQ ID NO: 15616 - RNA, 19 nt, artificial
  Oligomer
uucugaaccauuacuguaa

SEQ ID NO: 15617 - RNA, 19 nt, artificial
  Oligomer
gcaucuuacaaaaacaaga

SEQ ID NO: 15618 - RNA, 19 nt, artificial
  Oligomer
gcuguacauuuggugcacu

SEQ ID NO: 15619 - RNA, 19 nt, artificial
  Oligomer
uacugagacauuacaguuu

SEQ ID NO: 15620 - RNA, 19 nt, artificial
  Oligomer
guaagauuuagcacccuuc

SEQ ID NO: 15621 - RNA, 19 nt, artificial
  Oligomer
uaggauguuucacaaacua

SEQ ID NO: 15622 - RNA, 19 nt, artificial
  Oligomer
caguuaugaggcuacccaa

SEQ ID NO: 15623 - RNA, 19 nt, artificial
  Oligomer
cuacucaucuggcccagaa

SEQ ID NO: 15624 - RNA, 19 nt, artificial
  Oligomer
acgguagucaugaagacuc

SEQ ID NO: 15625 - RNA, 19 nt, artificial
  Oligomer
acacgguagucaugaagac

SEQ ID NO: 15626 - RNA, 19 nt, artificial
  Oligomer
ggcaaugauaacugggcca

SEQ ID NO: 15627 - RNA, 19 nt, artificial
  Oligomer
ugcauuugcaacacugaga

SEQ ID NO: 15628 - RNA, 19 nt, artificial
  Oligomer
gugccugagacaaaagaag

SEQ ID NO: 15629 - RNA, 19 nt, artificial
  Oligomer
agcuauaugagccaguggu

SEQ ID NO: 15630 - RNA, 19 nt, artificial
  Oligomer
gggacauuuccugaugcau

SEQ ID NO: 15631 - RNA, 19 nt, artificial
  Oligomer
ugaagucugagcccagaca

SEQ ID NO: 15632 - RNA, 19 nt, artificial
  Oligomer
agcugaagaacaguuagca

SEQ ID NO: 15633 - RNA, 19 nt, artificial
  Oligomer
gcuuucauguaugccaaga

SEQ ID NO: 15634 - RNA, 19 nt, artificial
  Oligomer
ucaacauuggcugcaugua

SEQ ID NO: 15635 - RNA, 19 nt, artificial
  Oligomer
cccggauuugcuucaacau

SEQ ID NO: 15636 - RNA, 19 nt, artificial
  Oligomer
guacccaggaugauuuccu

SEQ ID NO: 15637 - RNA, 19 nt, artificial
  Oligomer
acugagacauuacaguuug

SEQ ID NO: 15638 - RNA, 19 nt, artificial
  Oligomer
guacugagacauuacaguu

SEQ ID NO: 15639 - RNA, 19 nt, artificial
  Oligomer
cugcgcaacuacagauuug

SEQ ID NO: 15640 - RNA, 19 nt, artificial
  Oligomer
uccugguguuaucaaaggu

SEQ ID NO: 15641 - RNA, 19 nt, artificial
  Oligomer
ccucagcuuaagaaaggca

SEQ ID NO: 15642 - RNA, 19 nt, artificial
  Oligomer
gaagcucaguguucccaug

SEQ ID NO: 15643 - RNA, 19 nt, artificial
  Oligomer
ggguuugugccugagacaa

SEQ ID NO: 15644 - RNA, 19 nt, artificial
  Oligomer
uggaucaagacaguuucuc

SEQ ID NO: 15645 - RNA, 19 nt, artificial
  Oligomer
gccaagaaggauuaccuag

SEQ ID NO: 15646 - RNA, 19 nt, artificial
  Oligomer
uggccaagaaggauuaccu

SEQ ID NO: 15647 - RNA, 19 nt, artificial
  Oligomer
ugagcccagacauuccaaa

SEQ ID NO: 15648 - RNA, 19 nt, artificial
  Oligomer
ggccuuuaccagaagcauu

SEQ ID NO: 15649 - RNA, 19 nt, artificial
  Oligomer
guaaccuuauagguuacuc

SEQ ID NO: 15650 - RNA, 19 nt, artificial
  Oligomer
ugaaguaaccuuauagguu

SEQ ID NO: 15651 - RNA, 19 nt, artificial
  Oligomer
uggugcacuuuucuguguc

SEQ ID NO: 15652 - RNA, 19 nt, artificial
  Oligomer
uguucacacuguaaacauu

SEQ ID NO: 15653 - RNA, 19 nt, artificial
  Oligomer
agguacugauccuguuucu

SEQ ID NO: 15654 - RNA, 19 nt, artificial
  Oligomer
uuagcacccuucugcugua

SEQ ID NO: 15655 - RNA, 19 nt, artificial
  Oligomer
ccauucuacucaucuggcc

SEQ ID NO: 15656 - RNA, 19 nt, artificial
  Oligomer
ugaagcucaguguucccau

SEQ ID NO: 15657 - RNA, 19 nt, artificial
  Oligomer
cuaaggaagugaagcucag

SEQ ID NO: 15658 - RNA, 19 nt, artificial
  Oligomer
ggcuuguucccugcaacua

SEQ ID NO: 15659 - RNA, 19 nt, artificial
  Oligomer
aggcucaccgugugcuauu

SEQ ID NO: 15660 - RNA, 19 nt, artificial
  Oligomer
agacauuccaaaaucgaca

SEQ ID NO: 15661 - RNA, 19 nt, artificial
  Oligomer
cccagacauuccaaaaucg

SEQ ID NO: 15662 - RNA, 19 nt, artificial
  Oligomer
gcugaagaacaguuagcau

SEQ ID NO: 15663 - RNA, 19 nt, artificial
  Oligomer
ugauagacuauaagauccu

SEQ ID NO: 15664 - RNA, 19 nt, artificial
  Oligomer
aaggcuugaaguaaccuua

SEQ ID NO: 15665 - RNA, 19 nt, artificial
  Oligomer
uaaggcuugaaguaaccuu

SEQ ID NO: 15666 - RNA, 19 nt, artificial
  Oligomer
ccauuacuguaauuggcuc

SEQ ID NO: 15667 - RNA, 19 nt, artificial
  Oligomer
agcuguacauuuggugcac

SEQ ID NO: 15668 - RNA, 19 nt, artificial
  Oligomer
guguucacacuguaaacau

SEQ ID NO: 15669 - RNA, 19 nt, artificial
  Oligomer
cagguacugauccuguuuc

SEQ ID NO: 15670 - RNA, 19 nt, artificial
  Oligomer
gagucuuccagguacugau

SEQ ID NO: 15671 - RNA, 19 nt, artificial
  Oligomer
ccuauuacuuguuuguaag

SEQ ID NO: 15672 - RNA, 19 nt, artificial
  Oligomer
gucuaagaaacuggagcuc

SEQ ID NO: 15673 - RNA, 19 nt, artificial
  Oligomer
cacuacaaguacacgguag

SEQ ID NO: 15674 - RNA, 19 nt, artificial
  Oligomer
ugcacuacaaguacacggu

SEQ ID NO: 15675 - RNA, 19 nt, artificial
  Oligomer
aggugcacuacaaguacac

SEQ ID NO: 15676 - RNA, 19 nt, artificial
  Oligomer
ucaguguucccaugcccua

SEQ ID NO: 15677 - RNA, 19 nt, artificial
  Oligomer
caacuaccuugaaccaguu

SEQ ID NO: 15678 - RNA, 19 nt, artificial
  Oligomer
guuugugccugagacaaaa

SEQ ID NO: 15679 - RNA, 19 nt, artificial
  Oligomer
gagcccagacauuccaaaa

SEQ ID NO: 15680 - RNA, 19 nt, artificial
  Oligomer
gaaaaaagcugaagaacag

SEQ ID NO: 15681 - RNA, 19 nt, artificial
  Oligomer
caagcuguuugccugugag

SEQ ID NO: 15682 - RNA, 19 nt, artificial
  Oligomer
ucuacuaccagacagagaa

SEQ ID NO: 15683 - RNA, 19 nt, artificial
  Oligomer
gaagcagagaaggccuuua

SEQ ID NO: 15684 - RNA, 19 nt, artificial
  Oligomer
agccagcuguguucacacu

SEQ ID NO: 15685 - RNA, 19 nt, artificial
  Oligomer
cuagcuagccagcuguguu

SEQ ID NO: 15686 - RNA, 19 nt, artificial
  Oligomer
ugacucuguggugugagaa

SEQ ID NO: 15687 - RNA, 19 nt, artificial
  Oligomer
gagugugucuggaagcaga

SEQ ID NO: 15688 - RNA, 19 nt, artificial
  Oligomer
gguuaugagucaguugcca

SEQ ID NO: 15689 - RNA, 19 nt, artificial
  Oligomer
gcuccaguucaagcuguuu

SEQ ID NO: 15690 - RNA, 19 nt, artificial
  Oligomer
cugaagcagagaaggccuu

SEQ ID NO: 15691 - RNA, 19 nt, artificial
  Oligomer
uguaagauuuagcacccuu

SEQ ID NO: 15692 - RNA, 19 nt, artificial
  Oligomer
ccagaaagugaacaccuug

SEQ ID NO: 15693 - RNA, 19 nt, artificial
  Oligomer
gcccagaaagugaacaccu

SEQ ID NO: 15694 - RNA, 19 nt, artificial
  Oligomer
uggcccagaaagugaacac

SEQ ID NO: 15695 - RNA, 19 nt, artificial
  Oligomer
gccaagaaggaggaaugga

SEQ ID NO: 15696 - RNA, 19 nt, artificial
  Oligomer
agcacccuucugcuguaua

SEQ ID NO: 15697 - RNA, 19 nt, artificial
  Oligomer
cagcuggccaagaaggauu

SEQ ID NO: 15698 - RNA, 19 nt, artificial
  Oligomer
aggccuuuaccagaagcau

SEQ ID NO: 15699 - RNA, 19 nt, artificial
  Oligomer
cuagccagcuguguucaca

SEQ ID NO: 15700 - RNA, 19 nt, artificial
  Oligomer
ugcucugagugcuagcuag

SEQ ID NO: 15701 - RNA, 19 nt, artificial
  Oligomer
uggcuaucaaagaccuuaa

SEQ ID NO: 15702 - RNA, 19 nt, artificial
  Oligomer
uagcacccuucugcuguau

SEQ ID NO: 15703 - RNA, 19 nt, artificial
  Oligomer
gcuuaagaaaggcagccaa

SEQ ID NO: 15704 - RNA, 19 nt, artificial
  Oligomer
cugacucuguggugugaga

SEQ ID NO: 15705 - RNA, 19 nt, artificial
  Oligomer
ugauuuggcuaucaaagac

SEQ ID NO: 15706 - RNA, 19 nt, artificial
  Oligomer
agaaggccuuuaccagaag

SEQ ID NO: 15707 - RNA, 19 nt, artificial
  Oligomer
ggucaugccagggaacauu

SEQ ID NO: 15708 - RNA, 19 nt, artificial
  Oligomer
agcuuaagaaaggcagcca

SEQ ID NO: 15709 - RNA, 19 nt, artificial
  Oligomer
guucaagguaguugcaggg

SEQ ID NO: 15710 - RNA, 19 nt, artificial
  Oligomer
aucagcuuuuucacuuucc

SEQ ID NO: 15711 - RNA, 19 nt, artificial
  Oligomer
ucaggcaguaguuuuucac

SEQ ID NO: 15712 - RNA, 19 nt, artificial
  Oligomer
uucucaguguugcaaaugc

SEQ ID NO: 15713 - RNA, 19 nt, artificial
  Oligomer
uuaugaguaaccuauaagg

SEQ ID NO: 15714 - RNA, 19 nt, artificial
  Oligomer
auuuguacuuacuccuugg

SEQ ID NO: 15715 - RNA, 19 nt, artificial
  Oligomer
auucuucauucaccuuuga

SEQ ID NO: 15716 - RNA, 19 nt, artificial
  Oligomer
uuuuucacuuuccuugggu

SEQ ID NO: 15717 - RNA, 19 nt, artificial
  Oligomer
agucaggcaguaguuuuuc

SEQ ID NO: 15718 - RNA, 19 nt, artificial
  Oligomer
aaucaaggcuucuuuaagg

SEQ ID NO: 15719 - RNA, 19 nt, artificial
  Oligomer
uuccaaaucuguaguugcg

SEQ ID NO: 15720 - RNA, 19 nt, artificial
  Oligomer
ucuucaacaaaaacuuugg

SEQ ID NO: 15721 - RNA, 19 nt, artificial
  Oligomer
uuggguucaucuggaaagc

SEQ ID NO: 15722 - RNA, 19 nt, artificial
  Oligomer
aggcaguaguuuuucaccu

SEQ ID NO: 15723 - RNA, 19 nt, artificial
  Oligomer
uucaagguaguugcaggga

SEQ ID NO: 15724 - RNA, 19 nt, artificial
  Oligomer
uucugcccguugaacauga

SEQ ID NO: 15725 - RNA, 19 nt, artificial
  Oligomer
aucaaggcuucuuuaaggu

SEQ ID NO: 15726 - RNA, 19 nt, artificial
  Oligomer
aucauauuucucugucugg

SEQ ID NO: 15727 - RNA, 19 nt, artificial
  Oligomer
uucuucaggauaguguaca

SEQ ID NO: 15728 - RNA, 19 nt, artificial
  Oligomer
auucaccuuugauaacacc

SEQ ID NO: 15729 - RNA, 19 nt, artificial
  Oligomer
ugucugguuauuagcauca

SEQ ID NO: 15730 - RNA, 19 nt, artificial
  Oligomer
cuuuuucacuuuccuuggg

SEQ ID NO: 15731 - RNA, 19 nt, artificial
  Oligomer
aguaguuuuucaccuggcc

SEQ ID NO: 15732 - RNA, 19 nt, artificial
  Oligomer
uaagauaacuucucagugu

SEQ ID NO: 15733 - RNA, 19 nt, artificial
  Oligomer
uucaagacaaagacaaugu

SEQ ID NO: 15734 - RNA, 19 nt, artificial
  Oligomer
uugucucucauuuggucga

SEQ ID NO: 15735 - RNA, 19 nt, artificial
  Oligomer
ggauaguguacaugcagcc

SEQ ID NO: 15736 - RNA, 19 nt, artificial
  Oligomer
uuccaguccuucuuguccg

SEQ ID NO: 15737 - RNA, 19 nt, artificial
  Oligomer
auaugccuuaugaguaacc

SEQ ID NO: 15738 - RNA, 19 nt, artificial
  Oligomer
augaauguuuacaguguga

SEQ ID NO: 15739 - RNA, 19 nt, artificial
  Oligomer
uacucacaucauugucuag

SEQ ID NO: 15740 - RNA, 19 nt, artificial
  Oligomer
uaauagggcuucauuuucu

SEQ ID NO: 15741 - RNA, 19 nt, artificial
  Oligomer
cuucaacaaaaacuuuggg

SEQ ID NO: 15742 - RNA, 19 nt, artificial
  Oligomer
auaacugaagagugccucc

SEQ ID NO: 15743 - RNA, 19 nt, artificial
  Oligomer
cauccuucaugcugucuuc

SEQ ID NO: 15744 - RNA, 19 nt, artificial
  Oligomer
uuguagugcaccuugagug

SEQ ID NO: 15745 - RNA, 19 nt, artificial
  Oligomer
uggagcucuucuuuugucu

SEQ ID NO: 15746 - RNA, 19 nt, artificial
  Oligomer
cuugucucucauuuggucg

SEQ ID NO: 15747 - RNA, 19 nt, artificial
  Oligomer
uucccucgaagcugaauca

SEQ ID NO: 15748 - RNA, 19 nt, artificial
  Oligomer
aaucauauuucucugucug

SEQ ID NO: 15749 - RNA, 19 nt, artificial
  Oligomer
uugucucgguuaaugcuuc

SEQ ID NO: 15750 - RNA, 19 nt, artificial
  Oligomer
aggauaguguacaugcagc

SEQ ID NO: 15751 - RNA, 19 nt, artificial
  Oligomer
uaugccuuaugaguaaccu

SEQ ID NO: 15752 - RNA, 19 nt, artificial
  Oligomer
auccuggguacucacauca

SEQ ID NO: 15753 - RNA, 19 nt, artificial
  Oligomer
augucucaguacaguauac

SEQ ID NO: 15754 - RNA, 19 nt, artificial
  Oligomer
uugucugguuauuagcauc

SEQ ID NO: 15755 - RNA, 19 nt, artificial
  Oligomer
cucuucuuuugucucaggc

SEQ ID NO: 15756 - RNA, 19 nt, artificial
  Oligomer
agccaaaucauauuucucu

SEQ ID NO: 15757 - RNA, 19 nt, artificial
  Oligomer
ucucgguuaaugcuucugg

SEQ ID NO: 15758 - RNA, 19 nt, artificial
  Oligomer
agguagaaacuaggaggcc

SEQ ID NO: 15759 - RNA, 19 nt, artificial
  Oligomer
auguacagcuugaugaaug

SEQ ID NO: 15760 - RNA, 19 nt, artificial
  Oligomer
ugaugaauguuuacagugu

SEQ ID NO: 15761 - RNA, 19 nt, artificial
  Oligomer
uggguacucacaucauugu

SEQ ID NO: 15762 - RNA, 19 nt, artificial
  Oligomer
aucauugucuaguagguua

SEQ ID NO: 15763 - RNA, 19 nt, artificial
  Oligomer
uguaguuugugaaacaucc

SEQ ID NO: 15764 - RNA, 19 nt, artificial
  Oligomer
auccuagacuucucuccga

SEQ ID NO: 15765 - RNA, 19 nt, artificial
  Oligomer
ucauaacugaagagugccu

SEQ ID NO: 15766 - RNA, 19 nt, artificial
  Oligomer
agcuuuuucacuuuccuug

SEQ ID NO: 15767 - RNA, 19 nt, artificial
  Oligomer
uucacuuuccuuggguuca

SEQ ID NO: 15768 - RNA, 19 nt, artificial
  Oligomer
cuuaggcucuucuuuuugu

SEQ ID NO: 15769 - RNA, 19 nt, artificial
  Oligomer
uuaggcucuucuuuuuguu

SEQ ID NO: 15770 - RNA, 19 nt, artificial
  Oligomer
uucuuuuuguuucuggccu

SEQ ID NO: 15771 - RNA, 19 nt, artificial
  Oligomer
uuuggaacuaggaggagcu

SEQ ID NO: 15772 - RNA, 19 nt, artificial
  Oligomer
accuggagcucuucuuuug

SEQ ID NO: 15773 - RNA, 19 nt, artificial
  Oligomer
aaacccaaauagcacacgg

SEQ ID NO: 15774 - RNA, 19 nt, artificial
  Oligomer
aaacugucuugauccacca

SEQ ID NO: 15775 - RNA, 19 nt, artificial
  Oligomer
uucagcuuuuuuccauucc

SEQ ID NO: 15776 - RNA, 19 nt, artificial
  Oligomer
aaaggaaagaagcagagag

SEQ ID NO: 15777 - RNA, 19 nt, artificial
  Oligomer
caaaucauauuucucuguc

SEQ ID NO: 15778 - RNA, 19 nt, artificial
  Oligomer
auauuucucugucugguag

SEQ ID NO: 15779 - RNA, 19 nt, artificial
  Oligomer
ugcuugucucgguuaaugc

SEQ ID NO: 15780 - RNA, 19 nt, artificial
  Oligomer
ucaggauaguguacaugca

SEQ ID NO: 15781 - RNA, 19 nt, artificial
  Oligomer
uugggugucuuguuuuugu

SEQ ID NO: 15782 - RNA, 19 nt, artificial
  Oligomer
uguacagcuugaugaaugu

SEQ ID NO: 15783 - RNA, 19 nt, artificial
  Oligomer
uugaugaauguuuacagug

SEQ ID NO: 15784 - RNA, 19 nt, artificial
  Oligomer
ucacaucauugucuaguag

SEQ ID NO: 15785 - RNA, 19 nt, artificial
  Oligomer
ucauuuucuucagcuuugu

SEQ ID NO: 15786 - RNA, 19 nt, artificial
  Oligomer
gucuucaacaaaaacuuug

SEQ ID NO: 15787 - RNA, 19 nt, artificial
  Oligomer
cauucaccuuugauaacac

SEQ ID NO: 15788 - RNA, 19 nt, artificial
  Oligomer
uagccucauaacugaagag

SEQ ID NO: 15789 - RNA, 19 nt, artificial
  Oligomer
agcuuaguguguuccagcc

SEQ ID NO: 15790 - RNA, 19 nt, artificial
  Oligomer
uuaagauaacuucucagug

SEQ ID NO: 15791 - RNA, 19 nt, artificial
  Oligomer
gagcuucacuuccuuaggc

SEQ ID NO: 15792 - RNA, 19 nt, artificial
  Oligomer
ucacuuccuuaggcucuuc

SEQ ID NO: 15793 - RNA, 19 nt, artificial
  Oligomer
cacuuccuuaggcucuucu

SEQ ID NO: 15794 - RNA, 19 nt, artificial
  Oligomer
cuuuuuguuucuggccugg

SEQ ID NO: 15795 - RNA, 19 nt, artificial
  Oligomer
cuggagcucuucuuuuguc

SEQ ID NO: 15796 - RNA, 19 nt, artificial
  Oligomer
uugauccaccacagaugcc

SEQ ID NO: 15797 - RNA, 19 nt, artificial
  Oligomer
acuugucucucauuugguc

SEQ ID NO: 15798 - RNA, 19 nt, artificial
  Oligomer
cucauuuggucgaaacagc

SEQ ID NO: 15799 - RNA, 19 nt, artificial
  Oligomer
uugucgauuuuggaauguc

SEQ ID NO: 15800 - RNA, 19 nt, artificial
  Oligomer
aaggaaagaagcagagaga

SEQ ID NO: 15801 - RNA, 19 nt, artificial
  Oligomer
uuuguauaugccuuaugag

SEQ ID NO: 15802 - RNA, 19 nt, artificial
  Oligomer
uauaugccuuaugaguaac

SEQ ID NO: 15803 - RNA, 19 nt, artificial
  Oligomer
gaugaauguuuacagugug

SEQ ID NO: 15804 - RNA, 19 nt, artificial
  Oligomer
acaucauugucuaguaggu

SEQ ID NO: 15805 - RNA, 19 nt, artificial
  Oligomer
uuugugaaacauccuagac

SEQ ID NO: 15806 - RNA, 19 nt, artificial
  Oligomer
uugugaaacauccuagacu

SEQ ID NO: 15807 - RNA, 19 nt, artificial
  Oligomer
cuuuccaaaucuguaguug

SEQ ID NO: 15808 - RNA, 19 nt, artificial
  Oligomer
uccagccauucuucauuca

SEQ ID NO: 15809 - RNA, 19 nt, artificial
  Oligomer
cagccauucuucauucacc

SEQ ID NO: 15810 - RNA, 19 nt, artificial
  Oligomer
agccauucuucauucaccu

SEQ ID NO: 15811 - RNA, 19 nt, artificial
  Oligomer
cugagguucuguugucugg

SEQ ID NO: 15812 - RNA, 19 nt, artificial
  Oligomer
caucagcuuuuucacuuuc

SEQ ID NO: 15813 - RNA, 19 nt, artificial
  Oligomer
guaguuuuucaccuggccc

SEQ ID NO: 15814 - RNA, 19 nt, artificial
  Oligomer
cuucuuuuuguuucuggcc

SEQ ID NO: 15815 - RNA, 19 nt, artificial
  Oligomer
guggcccaguuaucauugc

SEQ ID NO: 15816 - RNA, 19 nt, artificial
  Oligomer
cuugucgauuuuggaaugu

SEQ ID NO: 15817 - RNA, 19 nt, artificial
  Oligomer
aucuuauagucuaucagcu

SEQ ID NO: 15818 - RNA, 19 nt, artificial
  Oligomer
ucuuuaaggucuuugauag

SEQ ID NO: 15819 - RNA, 19 nt, artificial
  Oligomer
uagccaaaucauauuucuc

SEQ ID NO: 15820 - RNA, 19 nt, artificial
  Oligomer
ucauauuucucugucuggu

SEQ ID NO: 15821 - RNA, 19 nt, artificial
  Oligomer
ugucucgguuaaugcuucu

SEQ ID NO: 15822 - RNA, 19 nt, artificial
  Oligomer
uucucugcuucagucaugu

SEQ ID NO: 15823 - RNA, 19 nt, artificial
  Oligomer
uaccaugagagagaaaagg

SEQ ID NO: 15824 - RNA, 19 nt, artificial
  Oligomer
accagggacaugauuaggu

SEQ ID NO: 15825 - RNA, 19 nt, artificial
  Oligomer
cuugaugaauguuuacagu

SEQ ID NO: 15826 - RNA, 19 nt, artificial
  Oligomer
uacaaacaaguaauagggc

SEQ ID NO: 15827 - RNA, 19 nt, artificial
  Oligomer
uccaaaucuguaguugcgc

SEQ ID NO: 15828 - RNA, 19 nt, artificial
  Oligomer
uucaccuuugauaacacca

SEQ ID NO: 15829 - RNA, 19 nt, artificial
  Oligomer
ucaccuuugauaacaccag

SEQ ID NO: 15830 - RNA, 19 nt, artificial
  Oligomer
caccuuugauaacaccagg

SEQ ID NO: 15831 - RNA, 19 nt, artificial
  Oligomer
uuugauaacaccaggauua

SEQ ID NO: 15832 - RNA, 19 nt, artificial
  Oligomer
ucagcuuuuucacuuuccu

SEQ ID NO: 15833 - RNA, 19 nt, artificial
  Oligomer
gcuuuuucacuuuccuugg

SEQ ID NO: 15834 - RNA, 19 nt, artificial
  Oligomer
agcucagcuuaguguguuc

SEQ ID NO: 15835 - RNA, 19 nt, artificial
  Oligomer
gcucagcuuaguguguucc

SEQ ID NO: 15836 - RNA, 19 nt, artificial
  Oligomer
cuuaagauaacuucucagu

SEQ ID NO: 15837 - RNA, 19 nt, artificial
  Oligomer
aagauaacuucucaguguu

SEQ ID NO: 15838 - RNA, 19 nt, artificial
  Oligomer
uucuucaagacaaagacaa

SEQ ID NO: 15839 - RNA, 19 nt, artificial
  Oligomer
agcucuucuuuugucucag

SEQ ID NO: 15840 - RNA, 19 nt, artificial
  Oligomer
gaaacugucuugauccacc

SEQ ID NO: 15841 - RNA, 19 nt, artificial
  Oligomer
cuugauccaccacagaugc

SEQ ID NO: 15842 - RNA, 19 nt, artificial
  Oligomer
uuccagacacacuccaucg

SEQ ID NO: 15843 - RNA, 19 nt, artificial
  Oligomer
agucuaucagcugguuccc

SEQ ID NO: 15844 - RNA, 19 nt, artificial
  Oligomer
ccaaaucauauuucucugu

SEQ ID NO: 15845 - RNA, 19 nt, artificial
  Oligomer
uuucucugucugguaguag

SEQ ID NO: 15846 - RNA, 19 nt, artificial
  Oligomer
cuucagucauguucuucag

SEQ ID NO: 15847 - RNA, 19 nt, artificial
  Oligomer
ucagucauguucuucagga

SEQ ID NO: 15848 - RNA, 19 nt, artificial
  Oligomer
cuuccaguccuucuugucc

SEQ ID NO: 15849 - RNA, 19 nt, artificial
  Oligomer
guauaugccuuaugaguaa

SEQ ID NO: 15850 - RNA, 19 nt, artificial
  Oligomer
cuauaagguuacuucaagc

SEQ ID NO: 15851 - RNA, 19 nt, artificial
  Oligomer
uuaagagccaauuacagua

SEQ ID NO: 15852 - RNA, 19 nt, artificial
  Oligomer
uaagagccaauuacaguaa

SEQ ID NO: 15853 - RNA, 19 nt, artificial
  Oligomer
uaaugguucagaaacagga

SEQ ID NO: 15854 - RNA, 19 nt, artificial
  Oligomer
caggaauauuuguacuuac

SEQ ID NO: 15855 - RNA, 19 nt, artificial
  Oligomer
uuuguaagaugcuagguuu

SEQ ID NO: 15856 - RNA, 19 nt, artificial
  Oligomer
caccaaauguacagcuuga

SEQ ID NO: 15857 - RNA, 19 nt, artificial
  Oligomer
gcuugaugaauguuuacag

SEQ ID NO: 15858 - RNA, 19 nt, artificial
  Oligomer
acucagagcaagaaacagg

SEQ ID NO: 15859 - RNA, 19 nt, artificial
  Oligomer
aguaccuggaagacucucu

SEQ ID NO: 15860 - RNA, 19 nt, artificial
  Oligomer
acacuuccauccacuuuuc

SEQ ID NO: 15861 - RNA, 19 nt, artificial
  Oligomer
uccaaacuguaaugucuca

SEQ ID NO: 15862 - RNA, 19 nt, artificial
  Oligomer
ucaguacaguauacagcag

SEQ ID NO: 15863 - RNA, 19 nt, artificial
  Oligomer
acaguauacagcagaaggg

SEQ ID NO: 15864 - RNA, 19 nt, artificial
  Oligomer
aauagggcuucauuuucuu

SEQ ID NO: 15865 - RNA, 19 nt, artificial
  Oligomer
cauccuagacuucucuccg

SEQ ID NO: 15866 - RNA, 19 nt, artificial
  Oligomer
gugcuuuccaaaucuguag

SEQ ID NO: 15867 - RNA, 19 nt, artificial
  Oligomer
uaguugcgcagucuucaac

SEQ ID NO: 15868 - RNA, 19 nt, artificial
  Oligomer
aagcugagguucuguuguc

SEQ ID NO: 15869 - RNA, 19 nt, artificial
  Oligomer
auagcucagcuuagugugu

SEQ ID NO: 15870 - RNA, 19 nt, artificial
  Oligomer
uagcucagcuuaguguguu

SEQ ID NO: 15871 - RNA, 19 nt, artificial
  Oligomer
ucccuuaagauaacuucuc

SEQ ID NO: 15872 - RNA, 19 nt, artificial
  Oligomer
acacugagcuucacuuccu

SEQ ID NO: 15873 - RNA, 19 nt, artificial
  Oligomer
uuuuguuucuggccuggug

SEQ ID NO: 15874 - RNA, 19 nt, artificial
  Oligomer
agacaaagacaauguuccc

SEQ ID NO: 15875 - RNA, 19 nt, artificial
  Oligomer
caaagacaauguucccugg

SEQ ID NO: 15876 - RNA, 19 nt, artificial
  Oligomer
acaaacccaaauagcacac

SEQ ID NO: 15877 - RNA, 19 nt, artificial
  Oligomer
aacccaaauagcacacggu

SEQ ID NO: 15878 - RNA, 19 nt, artificial
  Oligomer
aacugacucauaacccuac

SEQ ID NO: 15879 - RNA, 19 nt, artificial
  Oligomer
aaguaagccacugccaagu

SEQ ID NO: 15880 - RNA, 19 nt, artificial
  Oligomer
gucucgguuaaugcuucug

SEQ ID NO: 15881 - RNA, 19 nt, artificial
  Oligomer
cucugcuucagucauguuc

SEQ ID NO: 15882 - RNA, 19 nt, artificial
  Oligomer
uucagucauguucuucagg

SEQ ID NO: 15883 - RNA, 19 nt, artificial
  Oligomer
acuucaagccuuaagagcc

SEQ ID NO: 15884 - RNA, 19 nt, artificial
  Oligomer
cuucaagccuuaagagcca

SEQ ID NO: 15885 - RNA, 19 nt, artificial
  Oligomer
uuuuguaagaugcuagguu

SEQ ID NO: 15886 - RNA, 19 nt, artificial
  Oligomer
agcuugaugaauguuuaca

SEQ ID NO: 15887 - RNA, 19 nt, artificial
  Oligomer
guaccuggaagacucucuc

SEQ ID NO: 15888 - RNA, 19 nt, artificial
  Oligomer
accuggaagacucucucgu

SEQ ID NO: 15889 - RNA, 19 nt, artificial
  Oligomer
uuccagacacuuccaucca

SEQ ID NO: 15890 - RNA, 19 nt, artificial
  Oligomer
cacuuccauccacuuuucc

SEQ ID NO: 15891 - RNA, 19 nt, artificial
  Oligomer
cuuccauccacuuuuccuc

SEQ ID NO: 15892 - RNA, 19 nt, artificial
  Oligomer
uuccauccacuuuuccucu

SEQ ID NO: 15893 - RNA, 19 nt, artificial
  Oligomer
cacuuccaaacuguaaugu

SEQ ID NO: 15894 - RNA, 19 nt, artificial
  Oligomer
acagagagaagacagguug

SEQ ID NO: 15895 - RNA, 19 nt, artificial
  Oligomer
gaaacauccuagacuucuc

SEQ ID NO: 15896 - RNA, 19 nt, artificial
  Oligomer
uccuagacuucucuccgag

SEQ ID NO: 15897 - RNA, 19 nt, artificial
  Oligomer
aaaaugcccaccuucccuu

SEQ ID NO: 15898 - RNA, 19 nt, artificial
  Oligomer
aacugaagagugccuccac

SEQ ID NO: 15899 - RNA, 19 nt, artificial
  Oligomer
ucagcuuaguguguuccag

SEQ ID NO: 15900 - RNA, 19 nt, artificial
  Oligomer
cucuucuuuuuguuucugg

SEQ ID NO: 15901 - RNA, 19 nt, artificial
  Oligomer
ucuuuuuguuucuggccug

SEQ ID NO: 15902 - RNA, 19 nt, artificial
  Oligomer
cauugcccuucuucaagac

SEQ ID NO: 15903 - RNA, 19 nt, artificial
  Oligomer
gacaaagacaauguucccu

SEQ ID NO: 15904 - RNA, 19 nt, artificial
  Oligomer
aaagacaauguucccuggc

SEQ ID NO: 15905 - RNA, 19 nt, artificial
  Oligomer
aagacaauguucccuggca

SEQ ID NO: 15906 - RNA, 19 nt, artificial
  Oligomer
caaacccaaauagcacacg

SEQ ID NO: 15907 - RNA, 19 nt, artificial
  Oligomer
uguucuucagcuuuuuucc

SEQ ID NO: 15908 - RNA, 19 nt, artificial
  Oligomer
cuuuaaggucuuugauagc

SEQ ID NO: 15909 - RNA, 19 nt, artificial
  Oligomer
uuacuucaagccuuaagag

SEQ ID NO: 15910 - RNA, 19 nt, artificial
  Oligomer
agccuuaagagccaauuac

SEQ ID NO: 15911 - RNA, 19 nt, artificial
  Oligomer
aauuacaguaaugguucag

SEQ ID NO: 15912 - RNA, 19 nt, artificial
  Oligomer
uuuguacuuacuccuuggg

SEQ ID NO: 15913 - RNA, 19 nt, artificial
  Oligomer
cucagagcaagaaacagga

SEQ ID NO: 15914 - RNA, 19 nt, artificial
  Oligomer
ccauccacuuuuccucucc

SEQ ID NO: 15915 - RNA, 19 nt, artificial
  Oligomer
cauccacuuuuccucuccc

SEQ ID NO: 15916 - RNA, 19 nt, artificial
  Oligomer
guuaacacuuccaaacugu

SEQ ID NO: 15917 - RNA, 19 nt, artificial
  Oligomer
cuuccaaacuguaaugucu

SEQ ID NO: 15918 - RNA, 19 nt, artificial
  Oligomer
uuccaaacuguaaugucuc

SEQ ID NO: 15919 - RNA, 19 nt, artificial
  Oligomer
guaauagggcuucauuuuc

SEQ ID NO: 15920 - RNA, 19 nt, artificial
  Oligomer
agagaagacagguuggagc

SEQ ID NO: 15921 - RNA, 19 nt, artificial
  Oligomer
augcugucuucugaaaggg

SEQ ID NO: 15922 - RNA, 19 nt, artificial
  Oligomer
ccucccuuaagauaacuuc

SEQ ID NO: 15923 - RNA, 19 nt, artificial
  Oligomer
augacuaccguguacuugu

SEQ ID NO: 15924 - RNA, 19 nt, artificial
  Oligomer
cccuuaagauaacuucuca

SEQ ID NO: 15925 - RNA, 19 nt, artificial
  Oligomer
uuuuuguuucuggccuggu

SEQ ID NO: 15926 - RNA, 19 nt, artificial
  Oligomer
uucuucagcuuuuuuccau

SEQ ID NO: 15927 - RNA, 19 nt, artificial
  Oligomer
agcuuuuuuccauuccucc

SEQ ID NO: 15928 - RNA, 19 nt, artificial
  Oligomer
uguugaagcaaauccggga

SEQ ID NO: 15929 - RNA, 19 nt, artificial
  Oligomer
guugaagcaaauccgggag

SEQ ID NO: 15930 - RNA, 19 nt, artificial
  Oligomer
uugaagcaaauccgggagu

SEQ ID NO: 15931 - RNA, 19 nt, artificial
  Oligomer
uucaagccuuaagagccaa

SEQ ID NO: 15932 - RNA, 19 nt, artificial
  Oligomer
agagcaagaaacaggauca

SEQ ID NO: 15933 - RNA, 19 nt, artificial
  Oligomer
aagaaacaggaucaguacc

SEQ ID NO: 15934 - RNA, 19 nt, artificial
  Oligomer
uccauccacuuuuccucuc

SEQ ID NO: 15935 - RNA, 19 nt, artificial
  Oligomer
uacaguauacagcagaagg

SEQ ID NO: 15936 - RNA, 19 nt, artificial
  Oligomer
cagagagaagacagguugg

SEQ ID NO: 15937 - RNA, 19 nt, artificial
  Oligomer
agagagaagacagguugga

SEQ ID NO: 15938 - RNA, 19 nt, artificial
  Oligomer
acaaacaaguaauagggcu

SEQ ID NO: 15939 - RNA, 19 nt, artificial
  Oligomer
gauaacaccaggauuauau

SEQ ID NO: 15940 - RNA, 19 nt, artificial
  Oligomer
agcugagguucuguugucu

SEQ ID NO: 15941 - RNA, 19 nt, artificial
  Oligomer
auuagcaucagcuuuuuca

SEQ ID NO: 15942 - RNA, 19 nt, artificial
  Oligomer
uugaguguguagggcaugg

SEQ ID NO: 15943 - RNA, 19 nt, artificial
  Oligomer
ugcuuccagacacacucca

SEQ ID NO: 15944 - RNA, 19 nt, artificial
  Oligomer
ccuuuuggcaacugacuca

SEQ ID NO: 15945 - RNA, 19 nt, artificial
  Oligomer
gaucuuauagucuaucagc

SEQ ID NO: 15946 - RNA, 19 nt, artificial
  Oligomer
aguaaugguucagaaacag

SEQ ID NO: 15947 - RNA, 19 nt, artificial
  Oligomer
gagcaagaaacaggaucag

SEQ ID NO: 15948 - RNA, 19 nt, artificial
  Oligomer
aguuaacacuuccaaacug

SEQ ID NO: 15949 - RNA, 19 nt, artificial
  Oligomer
uucuuagacaccauguccc

SEQ ID NO: 15950 - RNA, 19 nt, artificial
  Oligomer
ucuucuuuuuguuucuggc

SEQ ID NO: 15951 - RNA, 19 nt, artificial
  Oligomer
caguuaucauugcccuucu

SEQ ID NO: 15952 - RNA, 19 nt, artificial
  Oligomer
caggcacaaacccaaauag

SEQ ID NO: 15953 - RNA, 19 nt, artificial
  Oligomer
cuucagcuuuuuuccauuc

SEQ ID NO: 15954 - RNA, 19 nt, artificial
  Oligomer
acugacucauaacccuacc

SEQ ID NO: 15955 - RNA, 19 nt, artificial
  Oligomer
cauaacccuaccaugagag

SEQ ID NO: 15956 - RNA, 19 nt, artificial
  Oligomer
aacccuaccaugagagaga

SEQ ID NO: 15957 - RNA, 19 nt, artificial
  Oligomer
auaguguacaugcagccaa

SEQ ID NO: 15958 - RNA, 19 nt, artificial
  Oligomer
uuguacuuacuccuugggc

SEQ ID NO: 15959 - RNA, 19 nt, artificial
  Oligomer
uaacuccuccauucaccug

SEQ ID NO: 15960 - RNA, 19 nt, artificial
  Oligomer
uucauuuucuucagcuuug

SEQ ID NO: 15961 - RNA, 19 nt, artificial
  Oligomer
agagagaaaaggaaagaag

SEQ ID NO: 15962 - RNA, 19 nt, artificial
  Oligomer
aggcucuucuuuuuguuuc

SEQ ID NO: 15963 - RNA, 19 nt, artificial
  Oligomer
cucaacugguucaagguag

SEQ ID NO: 15964 - RNA, 19 nt, artificial
  Oligomer
ucagcuuuuuuccauuccu

SEQ ID NO: 15965 - RNA, 19 nt, artificial
  Oligomer
cagcuuuuuuccauuccuc

SEQ ID NO: 15966 - RNA, 19 nt, artificial
  Oligomer
uaacccuaccaugagagag

SEQ ID NO: 15967 - RNA, 19 nt, artificial
  Oligomer
guaaugguucagaaacagg

SEQ ID NO: 15968 - RNA, 19 nt, artificial
  Oligomer
agcaauguuauauaacacc

SEQ ID NO: 15969 - RNA, 19 nt, artificial
  Oligomer
caauuacaguaaugguuca

SEQ ID NO: 15970 - RNA, 19 nt, artificial
  Oligomer
uagguagaaacuaggaggc

SEQ ID NO: 15971 - RNA, 19 nt, artificial
  Oligomer
uauuagcaucagcuuuuuc

SEQ ID NO: 15972 - RNA, 19 nt, artificial
  Oligomer
guuggaaguaagccacugc

SEQ ID NO: 15973 - RNA, 19 nt, artificial
  Oligomer
uguacuuacuccuugggcc

SEQ ID NO: 15974 - RNA, 19 nt, artificial
  Oligomer
uagggcuucauuuucuuca

SEQ ID NO: 15975 - RNA, 19 nt, artificial
  Oligomer
ugagucuucaugacuaccg

SEQ ID NO: 15976 - RNA, 19 nt, artificial
  Oligomer
uuuuuuccauuccuccuuc

SEQ ID NO: 15977 - RNA, 19 nt, artificial
  Oligomer
caauguuauauaacaccuc

SEQ ID NO: 15978 - RNA, 19 nt, artificial
  Oligomer
uuauagucuaucagcuggu

SEQ ID NO: 15979 - RNA, 19 nt, artificial
  Oligomer
auuagguagaaacuaggag

SEQ ID NO: 15980 - RNA, 19 nt, artificial
  Oligomer
aagugcaccaaauguacag

SEQ ID NO: 15981 - RNA, 19 nt, artificial
  Oligomer
uuagcaucagcuuuuucac

SEQ ID NO: 15982 - RNA, 19 nt, artificial
  Oligomer
gucacccacuguguucuca

SEQ ID NO: 15983 - RNA, 19 nt, artificial
  Oligomer
gucaggcaguaguuuuuca

SEQ ID NO: 15984 - RNA, 19 nt, artificial
  Oligomer
gaaaaggaaagaagcagag

SEQ ID NO: 15985 - RNA, 19 nt, artificial
  Oligomer
uuuuuccauuccuccuucu

SEQ ID NO: 15986 - RNA, 19 nt, artificial
  Oligomer
uaacaccucacaggcaaac

SEQ ID NO: 15987 - RNA, 19 nt, artificial
  Oligomer
uuuaaggucuuugauagcc

SEQ ID NO: 15988 - RNA, 19 nt, artificial
  Oligomer
ucuucagcuuuguaguuug

SEQ ID NO: 15989 - RNA, 19 nt, artificial
  Oligomer
uuccugaaacuccaggucc

SEQ ID NO: 15990 - RNA, 19 nt, artificial
  Oligomer
uuucuuagacaccaugucc

SEQ ID NO: 15991 - RNA, 19 nt, artificial
  Oligomer
uuagacaccaugucccgga

SEQ ID NO: 15992 - RNA, 19 nt, artificial
  Oligomer
uagugcaccuugagugugu

SEQ ID NO: 15993 - RNA, 19 nt, artificial
  Oligomer
acugguucaagguaguugc

SEQ ID NO: 15994 - RNA, 19 nt, artificial
  Oligomer
cauauagcuucugcuucca

SEQ ID NO: 15995 - RNA, 19 nt, artificial
  Oligomer
auauagcuucugcuuccag

SEQ ID NO: 15996 - RNA, 19 nt, artificial
  Oligomer
aucgccuugucgauuuugg

SEQ ID NO: 15997 - RNA, 19 nt, artificial
  Oligomer
auuuuggaaugucugggcu

SEQ ID NO: 15998 - RNA, 19 nt, artificial
  Oligomer
augcagccaauguugaagc

SEQ ID NO: 15999 - RNA, 19 nt, artificial
  Oligomer
augauuagguagaaacuag

SEQ ID NO: 16000 - RNA, 19 nt, artificial
  Oligomer
gauuagguagaaacuagga

SEQ ID NO: 16001 - RNA, 19 nt, artificial
  Oligomer
guuuuuguaagaugcuagg

SEQ ID NO: 16002 - RNA, 19 nt, artificial
  Oligomer
uuuuuguaagaugcuaggu

SEQ ID NO: 16003 - RNA, 19 nt, artificial
  Oligomer
uuauugugguaugacacag

SEQ ID NO: 16004 - RNA, 19 nt, artificial
  Oligomer
auagggcuucauuuucuuc

SEQ ID NO: 16005 - RNA, 19 nt, artificial
  Oligomer
ucagcuuuguaguuuguga

SEQ ID NO: 16006 - RNA, 19 nt, artificial
  Oligomer
aacaccaggauuauauccc

SEQ ID NO: 16007 - RNA, 19 nt, artificial
  Oligomer
uuccuuggguucaucugga

SEQ ID NO: 16008 - RNA, 19 nt, artificial
  Oligomer
caguaguuuuucaccuggc

SEQ ID NO: 16009 - RNA, 19 nt, artificial
  Oligomer
ucuuagacaccaugucccg

SEQ ID NO: 16010 - RNA, 19 nt, artificial
  Oligomer
gagaaaaggaaagaagcag

SEQ ID NO: 16011 - RNA, 19 nt, artificial
  Oligomer
uauagcuucugcuuccaga

SEQ ID NO: 16012 - RNA, 19 nt, artificial
  Oligomer
gcaauguuauauaacaccu

SEQ ID NO: 16013 - RNA, 19 nt, artificial
  Oligomer
uguuuuuguaagaugcuag

SEQ ID NO: 16014 - RNA, 19 nt, artificial
  Oligomer
augagagagaaaaggaaag

SEQ ID NO: 16015 - RNA, 19 nt, artificial
  Oligomer
guaugacacagaaaagugc

SEQ ID NO: 16016 - RNA, 19 nt, artificial
  Oligomer
uuuacagugugaacacagc

SEQ ID NO: 16017 - RNA, 19 nt, artificial
  Oligomer
gagacagagagaagacagg

SEQ ID NO: 16018 - RNA, 19 nt, artificial
  Oligomer
agggcuucauuuucuucag

SEQ ID NO: 16019 - RNA, 19 nt, artificial
  Oligomer
cuucagcuuuguaguuugu

SEQ ID NO: 16020 - RNA, 19 nt, artificial
  Oligomer
uucagcuuuguaguuugug

SEQ ID NO: 16021 - RNA, 19 nt, artificial
  Oligomer
uagacuucucuccgagugc

SEQ ID NO: 16022 - RNA, 19 nt, artificial
  Oligomer
aaucuguaguugcgcaguc

SEQ ID NO: 16023 - RNA, 19 nt, artificial
  Oligomer
aucuguaguugcgcagucu

SEQ ID NO: 16024 - RNA, 19 nt, artificial
  Oligomer
gcaguaguuuuucaccugg

SEQ ID NO: 16025 - RNA, 19 nt, artificial
  Oligomer
gauaacuucucaguguugc

SEQ ID NO: 16026 - RNA, 19 nt, artificial
  Oligomer
agaaaaggaaagaagcaga

SEQ ID NO: 16027 - RNA, 19 nt, artificial
  Oligomer
uugccuagguaauccuucu

SEQ ID NO: 16028 - RNA, 19 nt, artificial
  Oligomer
gccuagguaauccuucuug

SEQ ID NO: 16029 - RNA, 19 nt, artificial
  Oligomer
cacuggcucauauagcuuc

SEQ ID NO: 16030 - RNA, 19 nt, artificial
  Oligomer
acuggcucauauagcuucu

SEQ ID NO: 16031 - RNA, 19 nt, artificial
  Oligomer
uggcucauauagcuucugc

SEQ ID NO: 16032 - RNA, 19 nt, artificial
  Oligomer
auguuauauaacaccucac

SEQ ID NO: 16033 - RNA, 19 nt, artificial
  Oligomer
aauguugaagcaaauccgg

SEQ ID NO: 16034 - RNA, 19 nt, artificial
  Oligomer
uacagugugaacacagcug

SEQ ID NO: 16035 - RNA, 19 nt, artificial
  Oligomer
agguuaaauuuuaacaggg

SEQ ID NO: 16036 - RNA, 19 nt, artificial
  Oligomer
uuacaaacaaguaauaggg

SEQ ID NO: 16037 - RNA, 19 nt, artificial
  Oligomer
caggcauccuucaugcugu

SEQ ID NO: 16038 - RNA, 19 nt, artificial
  Oligomer
cuucaugacuaccguguac

SEQ ID NO: 16039 - RNA, 19 nt, artificial
  Oligomer
uucaugacuaccguguacu

SEQ ID NO: 16040 - RNA, 19 nt, artificial
  Oligomer
aaacccagagaaacugucu

SEQ ID NO: 16041 - RNA, 19 nt, artificial
  Oligomer
uaauccuucuuggccagcu

SEQ ID NO: 16042 - RNA, 19 nt, artificial
  Oligomer
uuggcauacaugaaagcaa

SEQ ID NO: 16043 - RNA, 19 nt, artificial
  Oligomer
cuuauagucuaucagcugg

SEQ ID NO: 16044 - RNA, 19 nt, artificial
  Oligomer
uauagucuaucagcugguu

SEQ ID NO: 16045 - RNA, 19 nt, artificial
  Oligomer
uauugugguaugacacaga

SEQ ID NO: 16046 - RNA, 19 nt, artificial
  Oligomer
augacacagaaaagugcac

SEQ ID NO: 16047 - RNA, 19 nt, artificial
  Oligomer
aaaagugcaccaaauguac

SEQ ID NO: 16048 - RNA, 19 nt, artificial
  Oligomer
gaaacuaggaggccaagag

SEQ ID NO: 16049 - RNA, 19 nt, artificial
  Oligomer
aacaggaucaguaccugga

SEQ ID NO: 16050 - RNA, 19 nt, artificial
  Oligomer
ugagagagaaaaggaaaga

SEQ ID NO: 16051 - RNA, 19 nt, artificial
  Oligomer
cuuccugaaacuccagguc

SEQ ID NO: 16052 - RNA, 19 nt, artificial
  Oligomer
uuucuuaagcugagguucu

SEQ ID NO: 16053 - RNA, 19 nt, artificial
  Oligomer
uggucacccacuguguucu

SEQ ID NO: 16054 - RNA, 19 nt, artificial
  Oligomer
uccaguuucuuagacacca

SEQ ID NO: 16055 - RNA, 19 nt, artificial
  Oligomer
uuugucucaggcacaaacc

SEQ ID NO: 16056 - RNA, 19 nt, artificial
  Oligomer
aguguugcaaaugcaucag

SEQ ID NO: 16057 - RNA, 19 nt, artificial
  Oligomer
aaauagcacacggugagcc

SEQ ID NO: 16058 - RNA, 19 nt, artificial
  Oligomer
guguugcaaaugcaucagg

SEQ ID NO: 16059 - RNA, 19 nt, artificial
  Oligomer
uagguaauccuucuuggcc

SEQ ID NO: 16060 - RNA, 19 nt, artificial
  Oligomer
cugagccacuugucucuca

SEQ ID NO: 16061 - RNA, 19 nt, artificial
  Oligomer
aaaugcaucaggaaauguc

SEQ ID NO: 16062 - RNA, 19 nt, artificial
  Oligomer
aaugcaucaggaaaugucc

SEQ ID NO: 16063 - RNA, 19 nt, artificial
  Oligomer
gauuuuggaaugucugggc

SEQ ID NO: 16064 - RNA, 19 nt, artificial
  Oligomer
augucugggcucagacuuc

SEQ ID NO: 16065 - RNA, 19 nt, artificial
  Oligomer
ucguggccaaugcuaacug

SEQ ID NO: 16066 - RNA, 19 nt, artificial
  Oligomer
uauauaacaccucacaggc

SEQ ID NO: 16067 - RNA, 19 nt, artificial
  Oligomer
gauagccaaaucauauuuc

SEQ ID NO: 16068 - RNA, 19 nt, artificial
  Oligomer
aguagagcaucccucguug

SEQ ID NO: 16069 - RNA, 19 nt, artificial
  Oligomer
uaaccuauaagguuacuuc

SEQ ID NO: 16070 - RNA, 19 nt, artificial
  Oligomer
auuacaguaaugguucaga

SEQ ID NO: 16071 - RNA, 19 nt, artificial
  Oligomer
uuuuauugugguaugacac

SEQ ID NO: 16072 - RNA, 19 nt, artificial
  Oligomer
aacuaggaggccaagagag

SEQ ID NO: 16073 - RNA, 19 nt, artificial
  Oligomer
aacaaguaauagggcuuca

SEQ ID NO: 16074 - RNA, 19 nt, artificial
  Oligomer
ccucauaacugaagagugc

SEQ ID NO: 16075 - RNA, 19 nt, artificial
  Oligomer
gucugguuauuagcaucag

SEQ ID NO: 16076 - RNA, 19 nt, artificial
  Oligomer
ucugguuauuagcaucagc

SEQ ID NO: 16077 - RNA, 19 nt, artificial
  Oligomer
caugcugucuucugaaagg

SEQ ID NO: 16078 - RNA, 19 nt, artificial
  Oligomer
uaacuucucaguguugcaa

SEQ ID NO: 16079 - RNA, 19 nt, artificial
  Oligomer
gagcucuucuuuugucuca

SEQ ID NO: 16080 - RNA, 19 nt, artificial
  Oligomer
caguguugcaaaugcauca

SEQ ID NO: 16081 - RNA, 19 nt, artificial
  Oligomer
agcuucugcuuccagacac

SEQ ID NO: 16082 - RNA, 19 nt, artificial
  Oligomer
ucgauuuuggaaugucugg

SEQ ID NO: 16083 - RNA, 19 nt, artificial
  Oligomer
auauaacaccucacaggca

SEQ ID NO: 16084 - RNA, 19 nt, artificial
  Oligomer
aacagcuugaacuggagcc

SEQ ID NO: 16085 - RNA, 19 nt, artificial
  Oligomer
ucgaagcugaaucaaggcu

SEQ ID NO: 16086 - RNA, 19 nt, artificial
  Oligomer
caaggcuucuuuaaggucu

SEQ ID NO: 16087 - RNA, 19 nt, artificial
  Oligomer
ucugucugguaguagagca

SEQ ID NO: 16088 - RNA, 19 nt, artificial
  Oligomer
uuaaugcuucugguaaagg

SEQ ID NO: 16089 - RNA, 19 nt, artificial
  Oligomer
gucauguucuucaggauag

SEQ ID NO: 16090 - RNA, 19 nt, artificial
  Oligomer
uaugaguaaccuauaaggu

SEQ ID NO: 16091 - RNA, 19 nt, artificial
  Oligomer
auugugguaugacacagaa

SEQ ID NO: 16092 - RNA, 19 nt, artificial
  Oligomer
uaugacacagaaaagugca

SEQ ID NO: 16093 - RNA, 19 nt, artificial
  Oligomer
ugacacagaaaagugcacc

SEQ ID NO: 16094 - RNA, 19 nt, artificial
  Oligomer
acagugugaacacagcugg

SEQ ID NO: 16095 - RNA, 19 nt, artificial
  Oligomer
aguuugugaaacauccuag

SEQ ID NO: 16096 - RNA, 19 nt, artificial
  Oligomer
aagguguucacuuucuggg

SEQ ID NO: 16097 - RNA, 19 nt, artificial
  Oligomer
ucauucaccuuugauaaca

SEQ ID NO: 16098 - RNA, 19 nt, artificial
  Oligomer
uaacaccaggauuauaucc

SEQ ID NO: 16099 - RNA, 19 nt, artificial
  Oligomer
cucauaacugaagagugcc

SEQ ID NO: 16100 - RNA, 19 nt, artificial
  Oligomer
cugguuauuagcaucagcu

SEQ ID NO: 16101 - RNA, 19 nt, artificial
  Oligomer
ucaucuggaaagccuuggu

SEQ ID NO: 16102 - RNA, 19 nt, artificial
  Oligomer
guuucuuagacaccauguc

SEQ ID NO: 16103 - RNA, 19 nt, artificial
  Oligomer
uaccguguacuuguagugc

SEQ ID NO: 16104 - RNA, 19 nt, artificial
  Oligomer
ugcaccuugaguguguagg

SEQ ID NO: 16105 - RNA, 19 nt, artificial
  Oligomer
cuuuggaacuaggaggagc

SEQ ID NO: 16106 - RNA, 19 nt, artificial
  Oligomer
auaacuucucaguguugca

SEQ ID NO: 16107 - RNA, 19 nt, artificial
  Oligomer
aacccagagaaacugucuu

SEQ ID NO: 16108 - RNA, 19 nt, artificial
  Oligomer
ccuagguaauccuucuugg

SEQ ID NO: 16109 - RNA, 19 nt, artificial
  Oligomer
ccacuugucucucauuugg

SEQ ID NO: 16110 - RNA, 19 nt, artificial
  Oligomer
uaacuguucuucagcuuuu

SEQ ID NO: 16111 - RNA, 19 nt, artificial
  Oligomer
uuuggcaacugacucauaa

SEQ ID NO: 16112 - RNA, 19 nt, artificial
  Oligomer
uauaacaccucacaggcaa

SEQ ID NO: 16113 - RNA, 19 nt, artificial
  Oligomer
cucgaagcugaaucaaggc

SEQ ID NO: 16114 - RNA, 19 nt, artificial
  Oligomer
uuuauugugguaugacaca

SEQ ID NO: 16115 - RNA, 19 nt, artificial
  Oligomer
uuacagugugaacacagcu

SEQ ID NO: 16116 - RNA, 19 nt, artificial
  Oligomer
aaacaggaucaguaccugg

SEQ ID NO: 16117 - RNA, 19 nt, artificial
  Oligomer
aagacagguuggagcgucu

SEQ ID NO: 16118 - RNA, 19 nt, artificial
  Oligomer
uggguagccucauaacuga

SEQ ID NO: 16119 - RNA, 19 nt, artificial
  Oligomer
aucuggaaagccuugguca

SEQ ID NO: 16120 - RNA, 19 nt, artificial
  Oligomer
uuaguguguuccagccgga

SEQ ID NO: 16121 - RNA, 19 nt, artificial
  Oligomer
agcuucacuuccuuaggcu

SEQ ID NO: 16122 - RNA, 19 nt, artificial
  Oligomer
cagcucaacugguucaagg

SEQ ID NO: 16123 - RNA, 19 nt, artificial
  Oligomer
acccagagaaacugucuug

SEQ ID NO: 16124 - RNA, 19 nt, artificial
  Oligomer
uguugcaaaugcaucagga

SEQ ID NO: 16125 - RNA, 19 nt, artificial
  Oligomer
agagaaacugucuugaucc

SEQ ID NO: 16126 - RNA, 19 nt, artificial
  Oligomer
agcugagccacuugucucu

SEQ ID NO: 16127 - RNA, 19 nt, artificial
  Oligomer
aaugcuaacuguucuucag

SEQ ID NO: 16128 - RNA, 19 nt, artificial
  Oligomer
aacuguucuucagcuuuuu

SEQ ID NO: 16129 - RNA, 19 nt, artificial
  Oligomer
uucuuggcauacaugaaag

SEQ ID NO: 16130 - RNA, 19 nt, artificial
  Oligomer
gcauacaugaaagcaaugu

SEQ ID NO: 16131 - RNA, 19 nt, artificial
  Oligomer
uguuauauaacaccucaca

SEQ ID NO: 16132 - RNA, 19 nt, artificial
  Oligomer
caaacagcuugaacuggag

SEQ ID NO: 16133 - RNA, 19 nt, artificial
  Oligomer
auagucuaucagcugguuc

SEQ ID NO: 16134 - RNA, 19 nt, artificial
  Oligomer
gaagcugaaucaaggcuuc

SEQ ID NO: 16135 - RNA, 19 nt, artificial
  Oligomer
aagcugaaucaaggcuucu

SEQ ID NO: 16136 - RNA, 19 nt, artificial
  Oligomer
gucugguaguagagcaucc

SEQ ID NO: 16137 - RNA, 19 nt, artificial
  Oligomer
ucugguaguagagcauccc

SEQ ID NO: 16138 - RNA, 19 nt, artificial
  Oligomer
cucguuggaaguaagccac

SEQ ID NO: 16139 - RNA, 19 nt, artificial
  Oligomer
ugcagccaauguugaagca

SEQ ID NO: 16140 - RNA, 19 nt, artificial
  Oligomer
cuuaugaguaaccuauaag

SEQ ID NO: 16141 - RNA, 19 nt, artificial
  Oligomer
auaagguuacuucaagccu

SEQ ID NO: 16142 - RNA, 19 nt, artificial
  Oligomer
uuacaguaaugguucagaa

SEQ ID NO: 16143 - RNA, 19 nt, artificial
  Oligomer
ucuuguuuuuguaagaugc

SEQ ID NO: 16144 - RNA, 19 nt, artificial
  Oligomer
agugcaccaaauguacagc

SEQ ID NO: 16145 - RNA, 19 nt, artificial
  Oligomer
aaacuguaaugucucagua

SEQ ID NO: 16146 - RNA, 19 nt, artificial
  Oligomer
gaagggugcuaaaucuuac

SEQ ID NO: 16147 - RNA, 19 nt, artificial
  Oligomer
uaguuugugaaacauccua

SEQ ID NO: 16148 - RNA, 19 nt, artificial
  Oligomer
uuggguagccucauaacug

SEQ ID NO: 16149 - RNA, 19 nt, artificial
  Oligomer
uucugggccagaugaguag

SEQ ID NO: 16150 - RNA, 19 nt, artificial
  Oligomer
gagucuucaugacuaccgu

SEQ ID NO: 16151 - RNA, 19 nt, artificial
  Oligomer
gucuucaugacuaccgugu

SEQ ID NO: 16152 - RNA, 19 nt, artificial
  Oligomer
uggcccaguuaucauugcc

SEQ ID NO: 16153 - RNA, 19 nt, artificial
  Oligomer
ucucaguguugcaaaugca

SEQ ID NO: 16154 - RNA, 19 nt, artificial
  Oligomer
cuucuuuugucucaggcac

SEQ ID NO: 16155 - RNA, 19 nt, artificial
  Oligomer
accacuggcucauauagcu

SEQ ID NO: 16156 - RNA, 19 nt, artificial
  Oligomer
augcaucaggaaauguccc

SEQ ID NO: 16157 - RNA, 19 nt, artificial
  Oligomer
ugucugggcucagacuuca

SEQ ID NO: 16158 - RNA, 19 nt, artificial
  Oligomer
ugcuaacuguucuucagcu

SEQ ID NO: 16159 - RNA, 19 nt, artificial
  Oligomer
ucuuggcauacaugaaagc

SEQ ID NO: 16160 - RNA, 19 nt, artificial
  Oligomer
uacaugcagccaauguuga

SEQ ID NO: 16161 - RNA, 19 nt, artificial
  Oligomer
auguugaagcaaauccggg

SEQ ID NO: 16162 - RNA, 19 nt, artificial
  Oligomer
aggaaaucauccuggguac

SEQ ID NO: 16163 - RNA, 19 nt, artificial
  Oligomer
caaacuguaaugucucagu

SEQ ID NO: 16164 - RNA, 19 nt, artificial
  Oligomer
aacuguaaugucucaguac

SEQ ID NO: 16165 - RNA, 19 nt, artificial
  Oligomer
caaaucuguaguugcgcag

SEQ ID NO: 16166 - RNA, 19 nt, artificial
  Oligomer
accuuugauaacaccagga

SEQ ID NO: 16167 - RNA, 19 nt, artificial
  Oligomer
ugccuuucuuaagcugagg

SEQ ID NO: 16168 - RNA, 19 nt, artificial
  Oligomer
caugggaacacugagcuuc

SEQ ID NO: 16169 - RNA, 19 nt, artificial
  Oligomer
uugucucaggcacaaaccc

SEQ ID NO: 16170 - RNA, 19 nt, artificial
  Oligomer
gagaaacugucuugaucca

SEQ ID NO: 16171 - RNA, 19 nt, artificial
  Oligomer
cuagguaauccuucuuggc

SEQ ID NO: 16172 - RNA, 19 nt, artificial
  Oligomer
agguaauccuucuuggcca

SEQ ID NO: 16173 - RNA, 19 nt, artificial
  Oligomer
uuuggaaugucugggcuca

SEQ ID NO: 16174 - RNA, 19 nt, artificial
  Oligomer
aaugcuucugguaaaggcc

SEQ ID NO: 16175 - RNA, 19 nt, artificial
  Oligomer
gaguaaccuauaagguuac

SEQ ID NO: 16176 - RNA, 19 nt, artificial
  Oligomer
aaccuauaagguuacuuca

SEQ ID NO: 16177 - RNA, 19 nt, artificial
  Oligomer
gacacagaaaagugcacca

SEQ ID NO: 16178 - RNA, 19 nt, artificial
  Oligomer
aauguuuacagugugaaca

SEQ ID NO: 16179 - RNA, 19 nt, artificial
  Oligomer
agaaacaggaucaguaccu

SEQ ID NO: 16180 - RNA, 19 nt, artificial
  Oligomer
uacagcagaagggugcuaa

SEQ ID NO: 16181 - RNA, 19 nt, artificial
  Oligomer
ggccagaugaguagaaugg

SEQ ID NO: 16182 - RNA, 19 nt, artificial
  Oligomer
augggaacacugagcuuca

SEQ ID NO: 16183 - RNA, 19 nt, artificial
  Oligomer
cugagcuucacuuccuuag

SEQ ID NO: 16184 - RNA, 19 nt, artificial
  Oligomer
uaguugcagggaacaagcc

SEQ ID NO: 16185 - RNA, 19 nt, artificial
  Oligomer
aauagcacacggugagccu

SEQ ID NO: 16186 - RNA, 19 nt, artificial
  Oligomer
ugucgauuuuggaaugucu

SEQ ID NO: 16187 - RNA, 19 nt, artificial
  Oligomer
cgauuuuggaaugucuggg

SEQ ID NO: 16188 - RNA, 19 nt, artificial
  Oligomer
augcuaacuguucuucagc

SEQ ID NO: 16189 - RNA, 19 nt, artificial
  Oligomer
aggaucuuauagucuauca

SEQ ID NO: 16190 - RNA, 19 nt, artificial
  Oligomer
uaagguuacuucaagccuu

SEQ ID NO: 16191 - RNA, 19 nt, artificial
  Oligomer
aagguuacuucaagccuua

SEQ ID NO: 16192 - RNA, 19 nt, artificial
  Oligomer
gagccaauuacaguaaugg

SEQ ID NO: 16193 - RNA, 19 nt, artificial
  Oligomer
gugcaccaaauguacagcu

SEQ ID NO: 16194 - RNA, 19 nt, artificial
  Oligomer
auguuuacagugugaacac

SEQ ID NO: 16195 - RNA, 19 nt, artificial
  Oligomer
gaaacaggaucaguaccug

SEQ ID NO: 16196 - RNA, 19 nt, artificial
  Oligomer
aucaguaccuggaagacuc

SEQ ID NO: 16197 - RNA, 19 nt, artificial
  Oligomer
cuuacaaacaaguaauagg

SEQ ID NO: 16198 - RNA, 19 nt, artificial
  Oligomer
gagcuccaguuucuuagac

SEQ ID NO: 16199 - RNA, 19 nt, artificial
  Oligomer
cuaccguguacuuguagug

SEQ ID NO: 16200 - RNA, 19 nt, artificial
  Oligomer
accguguacuuguagugca

SEQ ID NO: 16201 - RNA, 19 nt, artificial
  Oligomer
guguacuuguagugcaccu

SEQ ID NO: 16202 - RNA, 19 nt, artificial
  Oligomer
uagggcaugggaacacuga

SEQ ID NO: 16203 - RNA, 19 nt, artificial
  Oligomer
aacugguucaagguaguug

SEQ ID NO: 16204 - RNA, 19 nt, artificial
  Oligomer
uuuugucucaggcacaaac

SEQ ID NO: 16205 - RNA, 19 nt, artificial
  Oligomer
uuuuggaaugucugggcuc

SEQ ID NO: 16206 - RNA, 19 nt, artificial
  Oligomer
cuguucuucagcuuuuuuc

SEQ ID NO: 16207 - RNA, 19 nt, artificial
  Oligomer
cucacaggcaaacagcuug

SEQ ID NO: 16208 - RNA, 19 nt, artificial
  Oligomer
uucucugucugguaguaga

SEQ ID NO: 16209 - RNA, 19 nt, artificial
  Oligomer
uaaaggccuucucugcuuc

SEQ ID NO: 16210 - RNA, 19 nt, artificial
  Oligomer
agugugaacacagcuggcu

SEQ ID NO: 16211 - RNA, 19 nt, artificial
  Oligomer
aacacagcuggcuagcuag

SEQ ID NO: 16212 - RNA, 19 nt, artificial
  Oligomer
uucucacaccacagaguca

SEQ ID NO: 16213 - RNA, 19 nt, artificial
  Oligomer
ucugcuuccagacacacuc

SEQ ID NO: 16214 - RNA, 19 nt, artificial
  Oligomer
uggcaacugacucauaacc

SEQ ID NO: 16215 - RNA, 19 nt, artificial
  Oligomer
aaacagcuugaacuggagc

SEQ ID NO: 16216 - RNA, 19 nt, artificial
  Oligomer
aaggccuucucugcuucag

SEQ ID NO: 16217 - RNA, 19 nt, artificial
  Oligomer
aagggugcuaaaucuuaca

SEQ ID NO: 16218 - RNA, 19 nt, artificial
  Oligomer
caagguguucacuuucugg

SEQ ID NO: 16219 - RNA, 19 nt, artificial
  Oligomer
agguguucacuuucugggc

SEQ ID NO: 16220 - RNA, 19 nt, artificial
  Oligomer
guguucacuuucugggcca

SEQ ID NO: 16221 - RNA, 19 nt, artificial
  Oligomer
uccauuccuccuucuuggc

SEQ ID NO: 16222 - RNA, 19 nt, artificial
  Oligomer
uauacagcagaagggugcu

SEQ ID NO: 16223 - RNA, 19 nt, artificial
  Oligomer
aauccuucuuggccagcug

SEQ ID NO: 16224 - RNA, 19 nt, artificial
  Oligomer
augcuucugguaaaggccu

SEQ ID NO: 16225 - RNA, 19 nt, artificial
  Oligomer
ugugaacacagcuggcuag

SEQ ID NO: 16226 - RNA, 19 nt, artificial
  Oligomer
cuagcuagcacucagagca

SEQ ID NO: 16227 - RNA, 19 nt, artificial
  Oligomer
uuaaggucuuugauagcca

SEQ ID NO: 16228 - RNA, 19 nt, artificial
  Oligomer
auacagcagaagggugcua

SEQ ID NO: 16229 - RNA, 19 nt, artificial
  Oligomer
uuggcugccuuucuuaagc

SEQ ID NO: 16230 - RNA, 19 nt, artificial
  Oligomer
ucucacaccacagagucag

SEQ ID NO: 16231 - RNA, 19 nt, artificial
  Oligomer
gucuuugauagccaaauca

SEQ ID NO: 16232 - RNA, 19 nt, artificial
  Oligomer
cuucugguaaaggccuucu

SEQ ID NO: 16233 - RNA, 19 nt, artificial
  Oligomer
aauguucccuggcaugacc

SEQ ID NO: 16234 - RNA, 19 nt, artificial
  Oligomer
uggcugccuuucuuaagcu

SEQ ID NO: 16235 - RNA, 21 nt, artificial
  Oligomer
gaaaaacuacugccugacucu

SEQ ID NO: 16236 - RNA, 21 nt, artificial
  Oligomer
ccagacagagaaauaugauuu

SEQ ID NO: 16237 - RNA, 21 nt, artificial
  Oligomer
gcauguacacuauccugaaga

SEQ ID NO: 16238 - RNA, 21 nt, artificial
  Oligomer
gaacccaaggaaagugaaaaa

SEQ ID NO: 16239 - RNA, 21 nt, artificial
  Oligomer
cccugcaacuaccuugaacca

SEQ ID NO: 16240 - RNA, 21 nt, artificial
  Oligomer
ccaaggaguaaguacaaauau

SEQ ID NO: 16241 - RNA, 21 nt, artificial
  Oligomer
gcgcaacuacagauuuggaaa

SEQ ID NO: 16242 - RNA, 21 nt, artificial
  Oligomer
caaaaagaagagccuaaggaa

SEQ ID NO: 16243 - RNA, 21 nt, artificial
  Oligomer
cgaccaaaugagagacaagug

SEQ ID NO: 16244 - RNA, 21 nt, artificial
  Oligomer
cggagagaagucuaggauguu

SEQ ID NO: 16245 - RNA, 21 nt, artificial
  Oligomer
ggaggcacucuucaguuauga

SEQ ID NO: 16246 - RNA, 21 nt, artificial
  Oligomer
ccaaggaaagugaaaaagcug

SEQ ID NO: 16247 - RNA, 21 nt, artificial
  Oligomer
ggucauguucaacgggcagaa

SEQ ID NO: 16248 - RNA, 21 nt, artificial
  Oligomer
gaacauugucuuugucuugaa

SEQ ID NO: 16249 - RNA, 21 nt, artificial
  Oligomer
cugcauguacacuauccugaa

SEQ ID NO: 16250 - RNA, 21 nt, artificial
  Oligomer
acauucaucaagcuguacauu

SEQ ID NO: 16251 - RNA, 21 nt, artificial
  Oligomer
gaagucuaggauguuucacaa

SEQ ID NO: 16252 - RNA, 21 nt, artificial
  Oligomer
agaagagccuaaggaagugaa

SEQ ID NO: 16253 - RNA, 21 nt, artificial
  Oligomer
ccaggccagaaacaaaaagaa

SEQ ID NO: 16254 - RNA, 21 nt, artificial
  Oligomer
cuacuaccagacagagaaaua

SEQ ID NO: 16255 - RNA, 21 nt, artificial
  Oligomer
cauguacacuauccugaagaa

SEQ ID NO: 16256 - RNA, 21 nt, artificial
  Oligomer
agguuacucauaaggcauaua

SEQ ID NO: 16257 - RNA, 21 nt, artificial
  Oligomer
guaaacauucaucaagcugua

SEQ ID NO: 16258 - RNA, 21 nt, artificial
  Oligomer
cacacuguaaacauucaucaa

SEQ ID NO: 16259 - RNA, 21 nt, artificial
  Oligomer
cccaaaguuuuuguugaagac

SEQ ID NO: 16260 - RNA, 21 nt, artificial
  Oligomer
gcuaauaaccagacaacagaa

SEQ ID NO: 16261 - RNA, 21 nt, artificial
  Oligomer
agaugaacccaaggaaaguga

SEQ ID NO: 16262 - RNA, 21 nt, artificial
  Oligomer
ccagaugaacccaaggaaagu

SEQ ID NO: 16263 - RNA, 21 nt, artificial
  Oligomer
gcaagcuguuucgaccaaaug

SEQ ID NO: 16264 - RNA, 21 nt, artificial
  Oligomer
gcauuaaccgagacaagcacu

SEQ ID NO: 16265 - RNA, 21 nt, artificial
  Oligomer
ccagaagcauuaaccgagaca

SEQ ID NO: 16266 - RNA, 21 nt, artificial
  Oligomer
cgagagagucuuccagguacu

SEQ ID NO: 16267 - RNA, 21 nt, artificial
  Oligomer
cuguauacuguacugagacau

SEQ ID NO: 16268 - RNA, 21 nt, artificial
  Oligomer
ggauguuucacaaacuacaaa

SEQ ID NO: 16269 - RNA, 21 nt, artificial
  Oligomer
cucucucugcuucuuuccuuu

SEQ ID NO: 16270 - RNA, 21 nt, artificial
  Oligomer
ggagagaagucuaggauguuu

SEQ ID NO: 16271 - RNA, 21 nt, artificial
  Oligomer
ccaaaguuuuuguugaagacu

SEQ ID NO: 16272 - RNA, 21 nt, artificial
  Oligomer
gugaaugaagaauggcuggaa

SEQ ID NO: 16273 - RNA, 21 nt, artificial
  Oligomer
ccugguguuaucaaaggugaa

SEQ ID NO: 16274 - RNA, 21 nt, artificial
  Oligomer
guggaggcacucuucaguuau

SEQ ID NO: 16275 - RNA, 21 nt, artificial
  Oligomer
ugaacccaaggaaagugaaaa

SEQ ID NO: 16276 - RNA, 21 nt, artificial
  Oligomer
gaugaacccaaggaaagugaa

SEQ ID NO: 16277 - RNA, 21 nt, artificial
  Oligomer
gucuugaagaagggcaaugau

SEQ ID NO: 16278 - RNA, 21 nt, artificial
  Oligomer
cauuugcaacacugagaaguu

SEQ ID NO: 16279 - RNA, 21 nt, artificial
  Oligomer
gggaacauugucuuugucuug

SEQ ID NO: 16280 - RNA, 21 nt, artificial
  Oligomer
accuuaaagaagccuugauuc

SEQ ID NO: 16281 - RNA, 21 nt, artificial
  Oligomer
gcuaucaaagaccuuaaagaa

SEQ ID NO: 16282 - RNA, 21 nt, artificial
  Oligomer
cagagaaauaugauuuggcua

SEQ ID NO: 16283 - RNA, 21 nt, artificial
  Oligomer
ccacucccggauuugcuucaa

SEQ ID NO: 16284 - RNA, 21 nt, artificial
  Oligomer
ggaaaaguggauggaaguguc

SEQ ID NO: 16285 - RNA, 21 nt, artificial
  Oligomer
ggagaggaaaaguggauggaa

SEQ ID NO: 16286 - RNA, 21 nt, artificial
  Oligomer
gacaaugaugugaguacccag

SEQ ID NO: 16287 - RNA, 21 nt, artificial
  Oligomer
gaaaaagcugaugcuaauaac

SEQ ID NO: 16288 - RNA, 21 nt, artificial
  Oligomer
cccaaggaaagugaaaaagcu

SEQ ID NO: 16289 - RNA, 21 nt, artificial
  Oligomer
gaagagccuaaggaagugaag

SEQ ID NO: 16290 - RNA, 21 nt, artificial
  Oligomer
acaaaagaagagcuccagguc

SEQ ID NO: 16291 - RNA, 21 nt, artificial
  Oligomer
uagguuacucauaaggcauau

SEQ ID NO: 16292 - RNA, 21 nt, artificial
  Oligomer
aacauucaucaagcuguacau

SEQ ID NO: 16293 - RNA, 21 nt, artificial
  Oligomer
ucacacuguaaacauucauca

SEQ ID NO: 16294 - RNA, 21 nt, artificial
  Oligomer
cacgagagagucuuccaggua

SEQ ID NO: 16295 - RNA, 21 nt, artificial
  Oligomer
ggacaggugaauggaggaguu

SEQ ID NO: 16296 - RNA, 21 nt, artificial
  Oligomer
ccuacuagacaaugaugugag

SEQ ID NO: 16297 - RNA, 21 nt, artificial
  Oligomer
gcaaagggaaggugggcauuu

SEQ ID NO: 16298 - RNA, 21 nt, artificial
  Oligomer
ugaaugaagaauggcuggaag

SEQ ID NO: 16299 - RNA, 21 nt, artificial
  Oligomer
aaggaaagugaaaaagcugau

SEQ ID NO: 16300 - RNA, 21 nt, artificial
  Oligomer
ucagaagacagcaugaaggau

SEQ ID NO: 16301 - RNA, 21 nt, artificial
  Oligomer
gucauguucaacgggcagaag

SEQ ID NO: 16302 - RNA, 21 nt, artificial
  Oligomer
gcauuugcaacacugagaagu

SEQ ID NO: 16303 - RNA, 21 nt, artificial
  Oligomer
gagacaaaagaagagcuccag

SEQ ID NO: 16304 - RNA, 21 nt, artificial
  Oligomer
gccugagacaaaagaagagcu

SEQ ID NO: 16305 - RNA, 21 nt, artificial
  Oligomer
guggcaucugugguggaucaa

SEQ ID NO: 16306 - RNA, 21 nt, artificial
  Oligomer
ccuuaaagaagccuugauuca

SEQ ID NO: 16307 - RNA, 21 nt, artificial
  Oligomer
acagagaaauaugauuuggcu

SEQ ID NO: 16308 - RNA, 21 nt, artificial
  Oligomer
agaagcauuaaccgagacaag

SEQ ID NO: 16309 - RNA, 21 nt, artificial
  Oligomer
cagaagcauuaaccgagacaa

SEQ ID NO: 16310 - RNA, 21 nt, artificial
  Oligomer
agcggacaagaaggacuggaa

SEQ ID NO: 16311 - RNA, 21 nt, artificial
  Oligomer
gguuacucauaaggcauauac

SEQ ID NO: 16312 - RNA, 21 nt, artificial
  Oligomer
ugaugugaguacccaggauga

SEQ ID NO: 16313 - RNA, 21 nt, artificial
  Oligomer
caaugaugugaguacccagga

SEQ ID NO: 16314 - RNA, 21 nt, artificial
  Oligomer
acauuacaguuuggaaguguu

SEQ ID NO: 16315 - RNA, 21 nt, artificial
  Oligomer
guauacuguacugagacauua

SEQ ID NO: 16316 - RNA, 21 nt, artificial
  Oligomer
uguauacuguacugagacauu

SEQ ID NO: 16317 - RNA, 21 nt, artificial
  Oligomer
aagucuaggauguuucacaaa

SEQ ID NO: 16318 - RNA, 21 nt, artificial
  Oligomer
agagaagucuaggauguuuca

SEQ ID NO: 16319 - RNA, 21 nt, artificial
  Oligomer
caacuacagauuuggaaagca

SEQ ID NO: 16320 - RNA, 21 nt, artificial
  Oligomer
gcaacuacagauuuggaaagc

SEQ ID NO: 16321 - RNA, 21 nt, artificial
  Oligomer
ugguguuaucaaaggugaaug

SEQ ID NO: 16322 - RNA, 21 nt, artificial
  Oligomer
ucaccaggccagaaacaaaaa

SEQ ID NO: 16323 - RNA, 21 nt, artificial
  Oligomer
acauugucuuugucuugaaga

SEQ ID NO: 16324 - RNA, 21 nt, artificial
  Oligomer
ccagggaacauugucuuuguc

SEQ ID NO: 16325 - RNA, 21 nt, artificial
  Oligomer
ccgugugcuauuuggguuugu

SEQ ID NO: 16326 - RNA, 21 nt, artificial
  Oligomer
ggcaucugugguggaucaaga

SEQ ID NO: 16327 - RNA, 21 nt, artificial
  Oligomer
agcuguuucgaccaaaugaga

SEQ ID NO: 16328 - RNA, 21 nt, artificial
  Oligomer
cagacagagaaauaugauuug

SEQ ID NO: 16329 - RNA, 21 nt, artificial
  Oligomer
accagacagagaaauaugauu

SEQ ID NO: 16330 - RNA, 21 nt, artificial
  Oligomer
ccaacgagggaugcucuacua

SEQ ID NO: 16331 - RNA, 21 nt, artificial
  Oligomer
ggcucuuaaggcuugaaguaa

SEQ ID NO: 16332 - RNA, 21 nt, artificial
  Oligomer
cuguaaacauucaucaagcug

SEQ ID NO: 16333 - RNA, 21 nt, artificial
  Oligomer
acuguaaacauucaucaagcu

SEQ ID NO: 16334 - RNA, 21 nt, artificial
  Oligomer
ugcuguauacuguacugagac

SEQ ID NO: 16335 - RNA, 21 nt, artificial
  Oligomer
gagagaagucuaggauguuuc

SEQ ID NO: 16336 - RNA, 21 nt, artificial
  Oligomer
cgcaacuacagauuuggaaag

SEQ ID NO: 16337 - RNA, 21 nt, artificial
  Oligomer
ugcaaagggaaggugggcauu

SEQ ID NO: 16338 - RNA, 21 nt, artificial
  Oligomer
cugguguuaucaaaggugaau

SEQ ID NO: 16339 - RNA, 21 nt, artificial
  Oligomer
caacagaaccucagcuuaaga

SEQ ID NO: 16340 - RNA, 21 nt, artificial
  Oligomer
aggaaagugaaaaagcugaug

SEQ ID NO: 16341 - RNA, 21 nt, artificial
  Oligomer
acacugagaaguuaucuuaag

SEQ ID NO: 16342 - RNA, 21 nt, artificial
  Oligomer
caaugauaacugggccacggu

SEQ ID NO: 16343 - RNA, 21 nt, artificial
  Oligomer
ggaacauugucuuugucuuga

SEQ ID NO: 16344 - RNA, 21 nt, artificial
  Oligomer
gccagggaacauugucuuugu

SEQ ID NO: 16345 - RNA, 21 nt, artificial
  Oligomer
ugguggaucaagacaguuucu

SEQ ID NO: 16346 - RNA, 21 nt, artificial
  Oligomer
uggauggaagugucuggaaag

SEQ ID NO: 16347 - RNA, 21 nt, artificial
  Oligomer
guggauggaagugucuggaaa

SEQ ID NO: 16348 - RNA, 21 nt, artificial
  Oligomer
gaaaaguggauggaagugucu

SEQ ID NO: 16349 - RNA, 21 nt, artificial
  Oligomer
agaggaaaaguggauggaagu

SEQ ID NO: 16350 - RNA, 21 nt, artificial
  Oligomer
gggagaggaaaaguggaugga

SEQ ID NO: 16351 - RNA, 21 nt, artificial
  Oligomer
gugaguacccaggaugauuuc

SEQ ID NO: 16352 - RNA, 21 nt, artificial
  Oligomer
acccuucugcuguauacugua

SEQ ID NO: 16353 - RNA, 21 nt, artificial
  Oligomer
uggaaagcacucggagagaag

SEQ ID NO: 16354 - RNA, 21 nt, artificial
  Oligomer
ugcgcaacuacagauuuggaa

SEQ ID NO: 16355 - RNA, 21 nt, artificial
  Oligomer
caaagggaaggugggcauuuu

SEQ ID NO: 16356 - RNA, 21 nt, artificial
  Oligomer
agacaacagaaccucagcuua

SEQ ID NO: 16357 - RNA, 21 nt, artificial
  Oligomer
uggaacacacuaagcugagcu

SEQ ID NO: 16358 - RNA, 21 nt, artificial
  Oligomer
gaaguuaucuuaagggaggcu

SEQ ID NO: 16359 - RNA, 21 nt, artificial
  Oligomer
cacugagaaguuaucuuaagg

SEQ ID NO: 16360 - RNA, 21 nt, artificial
  Oligomer
gugguggaucaagacaguuuc

SEQ ID NO: 16361 - RNA, 21 nt, artificial
  Oligomer
gcuauaugagccaguggugau

SEQ ID NO: 16362 - RNA, 21 nt, artificial
  Oligomer
gaauggaaaaaagcugaagaa

SEQ ID NO: 16363 - RNA, 21 nt, artificial
  Oligomer
ggaauggaaaaaagcugaaga

SEQ ID NO: 16364 - RNA, 21 nt, artificial
  Oligomer
ggaggaauggaaaaaagcuga

SEQ ID NO: 16365 - RNA, 21 nt, artificial
  Oligomer
gaagaacaugacugaagcaga

SEQ ID NO: 16366 - RNA, 21 nt, artificial
  Oligomer
cugaagaacaugacugaagca

SEQ ID NO: 16367 - RNA, 21 nt, artificial
  Oligomer
gaguaaguacaaauauuccug

SEQ ID NO: 16368 - RNA, 21 nt, artificial
  Oligomer
gcccaaggaguaaguacaaau

SEQ ID NO: 16369 - RNA, 21 nt, artificial
  Oligomer
uuacaaaaacaagacacccaa

SEQ ID NO: 16370 - RNA, 21 nt, artificial
  Oligomer
guacugauccuguuucuugcu

SEQ ID NO: 16371 - RNA, 21 nt, artificial
  Oligomer
aguggauggaagugucuggaa

SEQ ID NO: 16372 - RNA, 21 nt, artificial
  Oligomer
gacauuacaguuuggaagugu

SEQ ID NO: 16373 - RNA, 21 nt, artificial
  Oligomer
gagacauuacaguuuggaagu

SEQ ID NO: 16374 - RNA, 21 nt, artificial
  Oligomer
gcuguauacuguacugagaca

SEQ ID NO: 16375 - RNA, 21 nt, artificial
  Oligomer
ccuucugcuguauacuguacu

SEQ ID NO: 16376 - RNA, 21 nt, artificial
  Oligomer
cagacaacagaaccucagcuu

SEQ ID NO: 16377 - RNA, 21 nt, artificial
  Oligomer
gcuggaacacacuaagcugag

SEQ ID NO: 16378 - RNA, 21 nt, artificial
  Oligomer
ugagaaguuaucuuaagggag

SEQ ID NO: 16379 - RNA, 21 nt, artificial
  Oligomer
cugagaaguuaucuuaaggga

SEQ ID NO: 16380 - RNA, 21 nt, artificial
  Oligomer
caggccagaaacaaaaagaag

SEQ ID NO: 16381 - RNA, 21 nt, artificial
  Oligomer
accaggccagaaacaaaaaga

SEQ ID NO: 16382 - RNA, 21 nt, artificial
  Oligomer
agggaacauugucuuugucuu

SEQ ID NO: 16383 - RNA, 21 nt, artificial
  Oligomer
gcuauuuggguuugugccuga

SEQ ID NO: 16384 - RNA, 21 nt, artificial
  Oligomer
cgugugcuauuuggguuugug

SEQ ID NO: 16385 - RNA, 21 nt, artificial
  Oligomer
gaacaugacugaagcagagaa

SEQ ID NO: 16386 - RNA, 21 nt, artificial
  Oligomer
agaacaugacugaagcagaga

SEQ ID NO: 16387 - RNA, 21 nt, artificial
  Oligomer
uggcucuuaaggcuugaagua

SEQ ID NO: 16388 - RNA, 21 nt, artificial
  Oligomer
uuacuguaauuggcucuuaag

SEQ ID NO: 16389 - RNA, 21 nt, artificial
  Oligomer
cccaaggaguaaguacaaaua

SEQ ID NO: 16390 - RNA, 21 nt, artificial
  Oligomer
gagagagucuuccagguacug

SEQ ID NO: 16391 - RNA, 21 nt, artificial
  Oligomer
uggaagugucuggaaagggca

SEQ ID NO: 16392 - RNA, 21 nt, artificial
  Oligomer
cauuacaguuuggaaguguua

SEQ ID NO: 16393 - RNA, 21 nt, artificial
  Oligomer
agauuuggaaagcacucggag

SEQ ID NO: 16394 - RNA, 21 nt, artificial
  Oligomer
cagauuuggaaagcacucgga

SEQ ID NO: 16395 - RNA, 21 nt, artificial
  Oligomer
gcuucuuuccuuuucucucuc

SEQ ID NO: 16396 - RNA, 21 nt, artificial
  Oligomer
aaggaagugaagcucaguguu

SEQ ID NO: 16397 - RNA, 21 nt, artificial
  Oligomer
cuuugucuugaagaagggcaa

SEQ ID NO: 16398 - RNA, 21 nt, artificial
  Oligomer
cagggaacauugucuuugucu

SEQ ID NO: 16399 - RNA, 21 nt, artificial
  Oligomer
cuggaagcagaagcuauauga

SEQ ID NO: 16400 - RNA, 21 nt, artificial
  Oligomer
ugaagaacaguuagcauuggc

SEQ ID NO: 16401 - RNA, 21 nt, artificial
  Oligomer
gaggaauggaaaaaagcugaa

SEQ ID NO: 16402 - RNA, 21 nt, artificial
  Oligomer
ccugaagaacaugacugaagc

SEQ ID NO: 16403 - RNA, 21 nt, artificial
  Oligomer
uguaauuggcucuuaaggcuu

SEQ ID NO: 16404 - RNA, 21 nt, artificial
  Oligomer
cauuacuguaauuggcucuua

SEQ ID NO: 16405 - RNA, 21 nt, artificial
  Oligomer
ugauccuguuucuugcucuga

SEQ ID NO: 16406 - RNA, 21 nt, artificial
  Oligomer
gacaggugaauggaggaguua

SEQ ID NO: 16407 - RNA, 21 nt, artificial
  Oligomer
caguuuggaaguguuaacuau

SEQ ID NO: 16408 - RNA, 21 nt, artificial
  Oligomer
cccuucugcuguauacuguac

SEQ ID NO: 16409 - RNA, 21 nt, artificial
  Oligomer
agaaaaugaagcccuauuacu

SEQ ID NO: 16410 - RNA, 21 nt, artificial
  Oligomer
gaagaaaaugaagcccuauua

SEQ ID NO: 16411 - RNA, 21 nt, artificial
  Oligomer
gauauaauccugguguuauca

SEQ ID NO: 16412 - RNA, 21 nt, artificial
  Oligomer
gacaacagaaccucagcuuaa

SEQ ID NO: 16413 - RNA, 21 nt, artificial
  Oligomer
ccagacaacagaaccucagcu

SEQ ID NO: 16414 - RNA, 21 nt, artificial
  Oligomer
ggccagaaacaaaaagaagag

SEQ ID NO: 16415 - RNA, 21 nt, artificial
  Oligomer
gaagaagggcaaugauaacug

SEQ ID NO: 16416 - RNA, 21 nt, artificial
  Oligomer
cuauuuggguuugugccugag

SEQ ID NO: 16417 - RNA, 21 nt, artificial
  Oligomer
ugguaggguuaugagucaguu

SEQ ID NO: 16418 - RNA, 21 nt, artificial
  Oligomer
uccuuuucucucucaugguag

SEQ ID NO: 16419 - RNA, 21 nt, artificial
  Oligomer
cacucccggauuugcuucaac

SEQ ID NO: 16420 - RNA, 21 nt, artificial
  Oligomer
gcucuuaaggcuugaaguaac

SEQ ID NO: 16421 - RNA, 21 nt, artificial
  Oligomer
uccuguuucuugcucugagug

SEQ ID NO: 16422 - RNA, 21 nt, artificial
  Oligomer
cugauccuguuucuugcucug

SEQ ID NO: 16423 - RNA, 21 nt, artificial
  Oligomer
cuccaaccugucuucucucug

SEQ ID NO: 16424 - RNA, 21 nt, artificial
  Oligomer
agaaacaaaaagaagagccua

SEQ ID NO: 16425 - RNA, 21 nt, artificial
  Oligomer
accgugugcuauuuggguuug

SEQ ID NO: 16426 - RNA, 21 nt, artificial
  Oligomer
gguaggguuaugagucaguug

SEQ ID NO: 16427 - RNA, 21 nt, artificial
  Oligomer
auccuguuucuugcucugagu

SEQ ID NO: 16428 - RNA, 21 nt, artificial
  Oligomer
guguuaacuauuuauucccug

SEQ ID NO: 16429 - RNA, 21 nt, artificial
  Oligomer
gugaaaaagcugaugcuaaua

SEQ ID NO: 16430 - RNA, 21 nt, artificial
  Oligomer
cgggacauggugucuaagaaa

SEQ ID NO: 16431 - RNA, 21 nt, artificial
  Oligomer
guaugccaagaaggaggaaug

SEQ ID NO: 16432 - RNA, 21 nt, artificial
  Oligomer
cauuggcugcauguacacuau

SEQ ID NO: 16433 - RNA, 21 nt, artificial
  Oligomer
gagaacacagugggugaccaa

SEQ ID NO: 16434 - RNA, 21 nt, artificial
  Oligomer
gaaacaaaaagaagagccuaa

SEQ ID NO: 16435 - RNA, 21 nt, artificial
  Oligomer
ccagaaacaaaaagaagagcc

SEQ ID NO: 16436 - RNA, 21 nt, artificial
  Oligomer
aggaauggaaaaaagcugaag

SEQ ID NO: 16437 - RNA, 21 nt, artificial
  Oligomer
uucucucucaugguaggguua

SEQ ID NO: 16438 - RNA, 21 nt, artificial
  Oligomer
ggcccaaggaguaaguacaaa

SEQ ID NO: 16439 - RNA, 21 nt, artificial
  Oligomer
uccuaguuucuaccuaaucau

SEQ ID NO: 16440 - RNA, 21 nt, artificial
  Oligomer
gccuccuaguuucuaccuaau

SEQ ID NO: 16441 - RNA, 21 nt, artificial
  Oligomer
gcugaagaaaaugaagcccua

SEQ ID NO: 16442 - RNA, 21 nt, artificial
  Oligomer
cagaaacaaaaagaagagccu

SEQ ID NO: 16443 - RNA, 21 nt, artificial
  Oligomer
aggcccaaggaguaaguacaa

SEQ ID NO: 16444 - RNA, 21 nt, artificial
  Oligomer
ccuccuaguuucuaccuaauc

SEQ ID NO: 16445 - RNA, 21 nt, artificial
  Oligomer
ggccuccuaguuucuaccuaa

SEQ ID NO: 16446 - RNA, 21 nt, artificial
  Oligomer
cugaagaaaaugaagcccuau

SEQ ID NO: 16447 - RNA, 21 nt, artificial
  Oligomer
caaacuacaaagcugaagaaa

SEQ ID NO: 16448 - RNA, 21 nt, artificial
  Oligomer
acaaacuacaaagcugaagaa

SEQ ID NO: 16449 - RNA, 21 nt, artificial
  Oligomer
cccuuucagaagacagcauga

SEQ ID NO: 16450 - RNA, 21 nt, artificial
  Oligomer
gccagaaacaaaaagaagagc

SEQ ID NO: 16451 - RNA, 21 nt, artificial
  Oligomer
ucucucugcuucuuuccuuuu

SEQ ID NO: 16452 - RNA, 21 nt, artificial
  Oligomer
cggauuugcuucaacauuggc

SEQ ID NO: 16453 - RNA, 21 nt, artificial
  Oligomer
ccaaccugucuucucucuguc

SEQ ID NO: 16454 - RNA, 21 nt, artificial
  Oligomer
acaaagcugaagaaaaugaag

SEQ ID NO: 16455 - RNA, 21 nt, artificial
  Oligomer
ucccaugcccuacacacucaa

SEQ ID NO: 16456 - RNA, 21 nt, artificial
  Oligomer
ccaagaaggaggaauggaaaa

SEQ ID NO: 16457 - RNA, 21 nt, artificial
  Oligomer
gaaccagcugauagacuauaa

SEQ ID NO: 16458 - RNA, 21 nt, artificial
  Oligomer
ggauuugcuucaacauuggcu

SEQ ID NO: 16459 - RNA, 21 nt, artificial
  Oligomer
ccuagcaucuuacaaaaacaa

SEQ ID NO: 16460 - RNA, 21 nt, artificial
  Oligomer
ggugcacuuuucugugucaua

SEQ ID NO: 16461 - RNA, 21 nt, artificial
  Oligomer
gcuguacauuuggugcacuuu

SEQ ID NO: 16462 - RNA, 21 nt, artificial
  Oligomer
cagcuguguucacacuguaaa

SEQ ID NO: 16463 - RNA, 21 nt, artificial
  Oligomer
ugaagaaaaugaagcccuauu

SEQ ID NO: 16464 - RNA, 21 nt, artificial
  Oligomer
ggugaaaaacuacugccugac

SEQ ID NO: 16465 - RNA, 21 nt, artificial
  Oligomer
ccaggugaaaaacuacugccu

SEQ ID NO: 16466 - RNA, 21 nt, artificial
  Oligomer
ccgggacauggugucuaagaa

SEQ ID NO: 16467 - RNA, 21 nt, artificial
  Oligomer
acaucccagcuccuccuaguu

SEQ ID NO: 16468 - RNA, 21 nt, artificial
  Oligomer
gcagaagcuauaugagccagu

SEQ ID NO: 16469 - RNA, 21 nt, artificial
  Oligomer
gcaguggcuuacuuccaacga

SEQ ID NO: 16470 - RNA, 21 nt, artificial
  Oligomer
accuagcaucuuacaaaaaca

SEQ ID NO: 16471 - RNA, 21 nt, artificial
  Oligomer
uucugugucauaccacaauaa

SEQ ID NO: 16472 - RNA, 21 nt, artificial
  Oligomer
gccagcuguguucacacugua

SEQ ID NO: 16473 - RNA, 21 nt, artificial
  Oligomer
cacucuucaguuaugaggcua

SEQ ID NO: 16474 - RNA, 21 nt, artificial
  Oligomer
gugaaaaacuacugccugacu

SEQ ID NO: 16475 - RNA, 21 nt, artificial
  Oligomer
cucugcuucuuuccuuuucuc

SEQ ID NO: 16476 - RNA, 21 nt, artificial
  Oligomer
ucucugcuucuuuccuuuucu

SEQ ID NO: 16477 - RNA, 21 nt, artificial
  Oligomer
gagguguuauauaacauugcu

SEQ ID NO: 16478 - RNA, 21 nt, artificial
  Oligomer
ggguuaugagucaguugccaa

SEQ ID NO: 16479 - RNA, 21 nt, artificial
  Oligomer
gaccuuaaagaagccuugauu

SEQ ID NO: 16480 - RNA, 21 nt, artificial
  Oligomer
cacuauccugaagaacaugac

SEQ ID NO: 16481 - RNA, 21 nt, artificial
  Oligomer
caacauuggcugcauguacac

SEQ ID NO: 16482 - RNA, 21 nt, artificial
  Oligomer
agcuguacauuuggugcacuu

SEQ ID NO: 16483 - RNA, 21 nt, artificial
  Oligomer
acagaaccucagcuuaagaaa

SEQ ID NO: 16484 - RNA, 21 nt, artificial
  Oligomer
agugaaaaagcugaugcuaau

SEQ ID NO: 16485 - RNA, 21 nt, artificial
  Oligomer
ggcuuuccagaugaacccaag

SEQ ID NO: 16486 - RNA, 21 nt, artificial
  Oligomer
ggacauggugucuaagaaacu

SEQ ID NO: 16487 - RNA, 21 nt, artificial
  Oligomer
ucaagacaguuucucuggguu

SEQ ID NO: 16488 - RNA, 21 nt, artificial
  Oligomer
ccugaugcauuugcaacacug

SEQ ID NO: 16489 - RNA, 21 nt, artificial
  Oligomer
ggcaagcuguuucgaccaaau

SEQ ID NO: 16490 - RNA, 21 nt, artificial
  Oligomer
gggcaagcuguuucgaccaaa

SEQ ID NO: 16491 - RNA, 21 nt, artificial
  Oligomer
agaaggaggaauggaaaaaag

SEQ ID NO: 16492 - RNA, 21 nt, artificial
  Oligomer
caagaaggaggaauggaaaaa

SEQ ID NO: 16493 - RNA, 21 nt, artificial
  Oligomer
gugagguguuauauaacauug

SEQ ID NO: 16494 - RNA, 21 nt, artificial
  Oligomer
gggaaccagcugauagacuau

SEQ ID NO: 16495 - RNA, 21 nt, artificial
  Oligomer
gccaucagccucuggaaugaa

SEQ ID NO: 16496 - RNA, 21 nt, artificial
  Oligomer
cuccuaguuucuaccuaauca

SEQ ID NO: 16497 - RNA, 21 nt, artificial
  Oligomer
uucuuuccuuuucucucucau

SEQ ID NO: 16498 - RNA, 21 nt, artificial
  Oligomer
caaccugucuucucucugucu

SEQ ID NO: 16499 - RNA, 21 nt, artificial
  Oligomer
cacaaacuacaaagcugaaga

SEQ ID NO: 16500 - RNA, 21 nt, artificial
  Oligomer
agacugcgcaacuacagauuu

SEQ ID NO: 16501 - RNA, 21 nt, artificial
  Oligomer
guguuaucaaaggugaaugaa

SEQ ID NO: 16502 - RNA, 21 nt, artificial
  Oligomer
cugaugcuaauaaccagacaa

SEQ ID NO: 16503 - RNA, 21 nt, artificial
  Oligomer
gaccaaggcuuuccagaugaa

SEQ ID NO: 16504 - RNA, 21 nt, artificial
  Oligomer
cuacacacucaaggugcacua

SEQ ID NO: 16505 - RNA, 21 nt, artificial
  Oligomer
uccugaugcauuugcaacacu

SEQ ID NO: 16506 - RNA, 21 nt, artificial
  Oligomer
caagaaggauuaccuaggcaa

SEQ ID NO: 16507 - RNA, 21 nt, artificial
  Oligomer
ccaagaaggauuaccuaggca

SEQ ID NO: 16508 - RNA, 21 nt, artificial
  Oligomer
gggcuccaguucaagcuguuu

SEQ ID NO: 16509 - RNA, 21 nt, artificial
  Oligomer
ggaaccagcugauagacuaua

SEQ ID NO: 16510 - RNA, 21 nt, artificial
  Oligomer
guacacuauccugaagaacau

SEQ ID NO: 16511 - RNA, 21 nt, artificial
  Oligomer
guacauuuggugcacuuuucu

SEQ ID NO: 16512 - RNA, 21 nt, artificial
  Oligomer
cuguacauuuggugcacuuuu

SEQ ID NO: 16513 - RNA, 21 nt, artificial
  Oligomer
guacugagacauuacaguuug

SEQ ID NO: 16514 - RNA, 21 nt, artificial
  Oligomer
gaggaccuggaguuucaggaa

SEQ ID NO: 16515 - RNA, 21 nt, artificial
  Oligomer
caggugaaaaacuacugccug

SEQ ID NO: 16516 - RNA, 21 nt, artificial
  Oligomer
gggccaggugaaaaacuacug

SEQ ID NO: 16517 - RNA, 21 nt, artificial
  Oligomer
agacagcaugaaggaugccug

SEQ ID NO: 16518 - RNA, 21 nt, artificial
  Oligomer
ggaacacacuaagcugagcua

SEQ ID NO: 16519 - RNA, 21 nt, artificial
  Oligomer
gggacauggugucuaagaaac

SEQ ID NO: 16520 - RNA, 21 nt, artificial
  Oligomer
cacgguagucaugaagacuca

SEQ ID NO: 16521 - RNA, 21 nt, artificial
  Oligomer
caaguacacgguagucaugaa

SEQ ID NO: 16522 - RNA, 21 nt, artificial
  Oligomer
gguuugugccugagacaaaag

SEQ ID NO: 16523 - RNA, 21 nt, artificial
  Oligomer
cuggccaagaaggauuaccua

SEQ ID NO: 16524 - RNA, 21 nt, artificial
  Oligomer
uggaagcagaagcuauaugag

SEQ ID NO: 16525 - RNA, 21 nt, artificial
  Oligomer
ggagugugucuggaagcagaa

SEQ ID NO: 16526 - RNA, 21 nt, artificial
  Oligomer
caaaaucgacaaggcgaugga

SEQ ID NO: 16527 - RNA, 21 nt, artificial
  Oligomer
cagacauuccaaaaucgacaa

SEQ ID NO: 16528 - RNA, 21 nt, artificial
  Oligomer
aagaaggaggaauggaaaaaa

SEQ ID NO: 16529 - RNA, 21 nt, artificial
  Oligomer
ugcuuucauguaugccaagaa

SEQ ID NO: 16530 - RNA, 21 nt, artificial
  Oligomer
cauugcuuucauguaugccaa

SEQ ID NO: 16531 - RNA, 21 nt, artificial
  Oligomer
ugagguguuauauaacauugc

SEQ ID NO: 16532 - RNA, 21 nt, artificial
  Oligomer
cugugagguguuauauaacau

SEQ ID NO: 16533 - RNA, 21 nt, artificial
  Oligomer
ugccugugagguguuauauaa

SEQ ID NO: 16534 - RNA, 21 nt, artificial
  Oligomer
ggcugcauguacacuauccug

SEQ ID NO: 16535 - RNA, 21 nt, artificial
  Oligomer
uggcugcauguacacuauccu

SEQ ID NO: 16536 - RNA, 21 nt, artificial
  Oligomer
guacaaauauuccuguuucug

SEQ ID NO: 16537 - RNA, 21 nt, artificial
  Oligomer
ucugugucauaccacaauaaa

SEQ ID NO: 16538 - RNA, 21 nt, artificial
  Oligomer
ccagcuguguucacacuguaa

SEQ ID NO: 16539 - RNA, 21 nt, artificial
  Oligomer
gcucucuuggccuccuaguuu

SEQ ID NO: 16540 - RNA, 21 nt, artificial
  Oligomer
cuacuagacaaugaugugagu

SEQ ID NO: 16541 - RNA, 21 nt, artificial
  Oligomer
cccuauuacuuguuuguaaga

SEQ ID NO: 16542 - RNA, 21 nt, artificial
  Oligomer
cuucuuuccuuuucucucuca

SEQ ID NO: 16543 - RNA, 21 nt, artificial
  Oligomer
gguguuaucaaaggugaauga

SEQ ID NO: 16544 - RNA, 21 nt, artificial
  Oligomer
gcugaugcuaauaaccagaca

SEQ ID NO: 16545 - RNA, 21 nt, artificial
  Oligomer
caacacugagaaguuaucuua

SEQ ID NO: 16546 - RNA, 21 nt, artificial
  Oligomer
ccagcuccuccuaguuccaaa

SEQ ID NO: 16547 - RNA, 21 nt, artificial
  Oligomer
uaacugggccacggucauguu

SEQ ID NO: 16548 - RNA, 21 nt, artificial
  Oligomer
ggaucaagacaguuucucugg

SEQ ID NO: 16549 - RNA, 21 nt, artificial
  Oligomer
gcaucugugguggaucaagac

SEQ ID NO: 16550 - RNA, 21 nt, artificial
  Oligomer
gucuggaagcagaagcuauau

SEQ ID NO: 16551 - RNA, 21 nt, artificial
  Oligomer
ggacauuuccugaugcauuug

SEQ ID NO: 16552 - RNA, 21 nt, artificial
  Oligomer
acaguuagcauuggccacgag

SEQ ID NO: 16553 - RNA, 21 nt, artificial
  Oligomer
gccugugagguguuauauaac

SEQ ID NO: 16554 - RNA, 21 nt, artificial
  Oligomer
agaccuuaaagaagccuugau

SEQ ID NO: 16555 - RNA, 21 nt, artificial
  Oligomer
gcuuacuuccaacgagggaug

SEQ ID NO: 16556 - RNA, 21 nt, artificial
  Oligomer
gcacuuggcaguggcuuacuu

SEQ ID NO: 16557 - RNA, 21 nt, artificial
  Oligomer
ggccuuuaccagaagcauuaa

SEQ ID NO: 16558 - RNA, 21 nt, artificial
  Oligomer
gcuucaacauuggcugcaugu

SEQ ID NO: 16559 - RNA, 21 nt, artificial
  Oligomer
ccggauuugcuucaacauugg

SEQ ID NO: 16560 - RNA, 21 nt, artificial
  Oligomer
accuuauagguuacucauaag

SEQ ID NO: 16561 - RNA, 21 nt, artificial
  Oligomer
cugugucauaccacaauaaaa

SEQ ID NO: 16562 - RNA, 21 nt, artificial
  Oligomer
cccuguuaaaauuuaaccuac

SEQ ID NO: 16563 - RNA, 21 nt, artificial
  Oligomer
ugaugcuaauaaccagacaac

SEQ ID NO: 16564 - RNA, 21 nt, artificial
  Oligomer
ugaccaaggcuuuccagauga

SEQ ID NO: 16565 - RNA, 21 nt, artificial
  Oligomer
acagugggugaccaaggcuuu

SEQ ID NO: 16566 - RNA, 21 nt, artificial
  Oligomer
gugugagaacacaguggguga

SEQ ID NO: 16567 - RNA, 21 nt, artificial
  Oligomer
ggugucuaagaaacuggagcu

SEQ ID NO: 16568 - RNA, 21 nt, artificial
  Oligomer
acgguagucaugaagacucag

SEQ ID NO: 16569 - RNA, 21 nt, artificial
  Oligomer
gcaacacugagaaguuaucuu

SEQ ID NO: 16570 - RNA, 21 nt, artificial
  Oligomer
guucccugcaacuaccuugaa

SEQ ID NO: 16571 - RNA, 21 nt, artificial
  Oligomer
caagacaguuucucuggguuu

SEQ ID NO: 16572 - RNA, 21 nt, artificial
  Oligomer
gggacauuuccugaugcauuu

SEQ ID NO: 16573 - RNA, 21 nt, artificial
  Oligomer
ugaagucugagcccagacauu

SEQ ID NO: 16574 - RNA, 21 nt, artificial
  Oligomer
augaagucugagcccagacau

SEQ ID NO: 16575 - RNA, 21 nt, artificial
  Oligomer
accagcugauagacuauaaga

SEQ ID NO: 16576 - RNA, 21 nt, artificial
  Oligomer
caacgagggaugcucuacuac

SEQ ID NO: 16577 - RNA, 21 nt, artificial
  Oligomer
uuccuguuucugaaccauuac

SEQ ID NO: 16578 - RNA, 21 nt, artificial
  Oligomer
cuuuucugugucauaccacaa

SEQ ID NO: 16579 - RNA, 21 nt, artificial
  Oligomer
uacuagacaaugaugugagua

SEQ ID NO: 16580 - RNA, 21 nt, artificial
  Oligomer
aggauguuucacaaacuacaa

SEQ ID NO: 16581 - RNA, 21 nt, artificial
  Oligomer
gaagacugcgcaacuacagau

SEQ ID NO: 16582 - RNA, 21 nt, artificial
  Oligomer
ggccaggugaaaaacuacugc

SEQ ID NO: 16583 - RNA, 21 nt, artificial
  Oligomer
cuacaaguacacgguagucau

SEQ ID NO: 16584 - RNA, 21 nt, artificial
  Oligomer
gcacuacaaguacacgguagu

SEQ ID NO: 16585 - RNA, 21 nt, artificial
  Oligomer
acacucaaggugcacuacaag

SEQ ID NO: 16586 - RNA, 21 nt, artificial
  Oligomer
cacacucaaggugcacuacaa

SEQ ID NO: 16587 - RNA, 21 nt, artificial
  Oligomer
uggguuugugccugagacaaa

SEQ ID NO: 16588 - RNA, 21 nt, artificial
  Oligomer
ccagacauuccaaaaucgaca

SEQ ID NO: 16589 - RNA, 21 nt, artificial
  Oligomer
guuaugagucaguugccaaaa

SEQ ID NO: 16590 - RNA, 21 nt, artificial
  Oligomer
ccagcugauagacuauaagau

SEQ ID NO: 16591 - RNA, 21 nt, artificial
  Oligomer
aaagaagccuugauucagcuu

SEQ ID NO: 16592 - RNA, 21 nt, artificial
  Oligomer
caaagaccuuaaagaagccuu

SEQ ID NO: 16593 - RNA, 21 nt, artificial
  Oligomer
ugcuucaacauuggcugcaug

SEQ ID NO: 16594 - RNA, 21 nt, artificial
  Oligomer
cccggauuugcuucaacauug

SEQ ID NO: 16595 - RNA, 21 nt, artificial
  Oligomer
guaaccuuauagguuacucau

SEQ ID NO: 16596 - RNA, 21 nt, artificial
  Oligomer
ccuaguuucuaccuaaucaug

SEQ ID NO: 16597 - RNA, 21 nt, artificial
  Oligomer
gcacuuuucugugucauacca

SEQ ID NO: 16598 - RNA, 21 nt, artificial
  Oligomer
uggugcacuuuucugugucau

SEQ ID NO: 16599 - RNA, 21 nt, artificial
  Oligomer
ccagguacugauccuguuucu

SEQ ID NO: 16600 - RNA, 21 nt, artificial
  Oligomer
cuguacugagacauuacaguu

SEQ ID NO: 16601 - RNA, 21 nt, artificial
  Oligomer
gucuaggauguuucacaaacu

SEQ ID NO: 16602 - RNA, 21 nt, artificial
  Oligomer
gcacucuucaguuaugaggcu

SEQ ID NO: 16603 - RNA, 21 nt, artificial
  Oligomer
ucuacucaucuggcccagaaa

SEQ ID NO: 16604 - RNA, 21 nt, artificial
  Oligomer
uuccagaugaacccaaggaaa

SEQ ID NO: 16605 - RNA, 21 nt, artificial
  Oligomer
cucuguggugugagaacacag

SEQ ID NO: 16606 - RNA, 21 nt, artificial
  Oligomer
ccugacucuguggugugagaa

SEQ ID NO: 16607 - RNA, 21 nt, artificial
  Oligomer
ccuuucagaagacagcaugaa

SEQ ID NO: 16608 - RNA, 21 nt, artificial
  Oligomer
gaacacacuaagcugagcuau

SEQ ID NO: 16609 - RNA, 21 nt, artificial
  Oligomer
ggguuugugccugagacaaaa

SEQ ID NO: 16610 - RNA, 21 nt, artificial
  Oligomer
cugaugcauuugcaacacuga

SEQ ID NO: 16611 - RNA, 21 nt, artificial
  Oligomer
gaggcucaccgugugcuauuu

SEQ ID NO: 16612 - RNA, 21 nt, artificial
  Oligomer
gccaagaaggauuaccuaggc

SEQ ID NO: 16613 - RNA, 21 nt, artificial
  Oligomer
gcccagacauuccaaaaucga

SEQ ID NO: 16614 - RNA, 21 nt, artificial
  Oligomer
ugagcccagacauuccaaaau

SEQ ID NO: 16615 - RNA, 21 nt, artificial
  Oligomer
agcauuggccacgagcaugaa

SEQ ID NO: 16616 - RNA, 21 nt, artificial
  Oligomer
gcuuucauguaugccaagaag

SEQ ID NO: 16617 - RNA, 21 nt, artificial
  Oligomer
gguuaugagucaguugccaaa

SEQ ID NO: 16618 - RNA, 21 nt, artificial
  Oligomer
uguuugccugugagguguuau

SEQ ID NO: 16619 - RNA, 21 nt, artificial
  Oligomer
gaagccuugauucagcuucga

SEQ ID NO: 16620 - RNA, 21 nt, artificial
  Oligomer
gagaaauaugauuuggcuauc

SEQ ID NO: 16621 - RNA, 21 nt, artificial
  Oligomer
cucuacuaccagacagagaaa

SEQ ID NO: 16622 - RNA, 21 nt, artificial
  Oligomer
ggcuuacuuccaacgagggau

SEQ ID NO: 16623 - RNA, 21 nt, artificial
  Oligomer
caagcacuuggcaguggcuua

SEQ ID NO: 16624 - RNA, 21 nt, artificial
  Oligomer
agagaaggccuuuaccagaag

SEQ ID NO: 16625 - RNA, 21 nt, artificial
  Oligomer
uugcuucaacauuggcugcau

SEQ ID NO: 16626 - RNA, 21 nt, artificial
  Oligomer
aggcuugaaguaaccuuauag

SEQ ID NO: 16627 - RNA, 21 nt, artificial
  Oligomer
ccauuacuguaauuggcucuu

SEQ ID NO: 16628 - RNA, 21 nt, artificial
  Oligomer
gcaucuuacaaaaacaagaca

SEQ ID NO: 16629 - RNA, 21 nt, artificial
  Oligomer
cacuuuucugugucauaccac

SEQ ID NO: 16630 - RNA, 21 nt, artificial
  Oligomer
guucacacuguaaacauucau

SEQ ID NO: 16631 - RNA, 21 nt, artificial
  Oligomer
agcuguguucacacuguaaac

SEQ ID NO: 16632 - RNA, 21 nt, artificial
  Oligomer
uggccuccuaguuucuaccua

SEQ ID NO: 16633 - RNA, 21 nt, artificial
  Oligomer
uguuucuugcucugagugcua

SEQ ID NO: 16634 - RNA, 21 nt, artificial
  Oligomer
uuccagguacugauccuguuu

SEQ ID NO: 16635 - RNA, 21 nt, artificial
  Oligomer
agagucuuccagguacugauc

SEQ ID NO: 16636 - RNA, 21 nt, artificial
  Oligomer
cugagacauuacaguuuggaa

SEQ ID NO: 16637 - RNA, 21 nt, artificial
  Oligomer
gcccuauuacuuguuuguaag

SEQ ID NO: 16638 - RNA, 21 nt, artificial
  Oligomer
ucuaggauguuucacaaacua

SEQ ID NO: 16639 - RNA, 21 nt, artificial
  Oligomer
ggauauaauccugguguuauc

SEQ ID NO: 16640 - RNA, 21 nt, artificial
  Oligomer
gggauauaauccugguguuau

SEQ ID NO: 16641 - RNA, 21 nt, artificial
  Oligomer
gaggcacucuucaguuaugag

SEQ ID NO: 16642 - RNA, 21 nt, artificial
  Oligomer
aaagugaaaaagcugaugcua

SEQ ID NO: 16643 - RNA, 21 nt, artificial
  Oligomer
gaaagugaaaaagcugaugcu

SEQ ID NO: 16644 - RNA, 21 nt, artificial
  Oligomer
ggaaagugaaaaagcugaugc

SEQ ID NO: 16645 - RNA, 21 nt, artificial
  Oligomer
accaaggcuuuccagaugaac

SEQ ID NO: 16646 - RNA, 21 nt, artificial
  Oligomer
ggugaccaaggcuuuccagau

SEQ ID NO: 16647 - RNA, 21 nt, artificial
  Oligomer
cagcuccuccuaguuccaaag

SEQ ID NO: 16648 - RNA, 21 nt, artificial
  Oligomer
ugcaacacugagaaguuaucu

SEQ ID NO: 16649 - RNA, 21 nt, artificial
  Oligomer
ugcauuugcaacacugagaag

SEQ ID NO: 16650 - RNA, 21 nt, artificial
  Oligomer
augcauuugcaacacugagaa

SEQ ID NO: 16651 - RNA, 21 nt, artificial
  Oligomer
ccugagacaaaagaagagcuc

SEQ ID NO: 16652 - RNA, 21 nt, artificial
  Oligomer
agacaguuucucuggguuugc

SEQ ID NO: 16653 - RNA, 21 nt, artificial
  Oligomer
ccaaaugagagacaaguggcu

SEQ ID NO: 16654 - RNA, 21 nt, artificial
  Oligomer
cccagacauuccaaaaucgac

SEQ ID NO: 16655 - RNA, 21 nt, artificial
  Oligomer
agcugaagaacaguuagcauu

SEQ ID NO: 16656 - RNA, 21 nt, artificial
  Oligomer
gaaaaaagcugaagaacaguu

SEQ ID NO: 16657 - RNA, 21 nt, artificial
  Oligomer
ggaaaaaagcugaagaacagu

SEQ ID NO: 16658 - RNA, 21 nt, artificial
  Oligomer
uaccagacagagaaauaugau

SEQ ID NO: 16659 - RNA, 21 nt, artificial
  Oligomer
uggcaguggcuuacuuccaac

SEQ ID NO: 16660 - RNA, 21 nt, artificial
  Oligomer
gaaggccuuuaccagaagcau

SEQ ID NO: 16661 - RNA, 21 nt, artificial
  Oligomer
ucccggauuugcuucaacauu

SEQ ID NO: 16662 - RNA, 21 nt, artificial
  Oligomer
ccaucagccucuggaaugaag

SEQ ID NO: 16663 - RNA, 21 nt, artificial
  Oligomer
ccuaaucaugucccuggugga

SEQ ID NO: 16664 - RNA, 21 nt, artificial
  Oligomer
cuaccuaaucaugucccuggu

SEQ ID NO: 16665 - RNA, 21 nt, artificial
  Oligomer
ggaguaaguacaaauauuccu

SEQ ID NO: 16666 - RNA, 21 nt, artificial
  Oligomer
caaaaacaagacacccaaguc

SEQ ID NO: 16667 - RNA, 21 nt, artificial
  Oligomer
acaguuuggaaguguuaacua

SEQ ID NO: 16668 - RNA, 21 nt, artificial
  Oligomer
cugucuucucucugucuccug

SEQ ID NO: 16669 - RNA, 21 nt, artificial
  Oligomer
cuaggauguuucacaaacuac

SEQ ID NO: 16670 - RNA, 21 nt, artificial
  Oligomer
ggcacucuucaguuaugaggc

SEQ ID NO: 16671 - RNA, 21 nt, artificial
  Oligomer
caaggugcacuacaaguacac

SEQ ID NO: 16672 - RNA, 21 nt, artificial
  Oligomer
ugauaacugggccacggucau

SEQ ID NO: 16673 - RNA, 21 nt, artificial
  Oligomer
guggaucaagacaguuucucu

SEQ ID NO: 16674 - RNA, 21 nt, artificial
  Oligomer
acauuuccugaugcauuugca

SEQ ID NO: 16675 - RNA, 21 nt, artificial
  Oligomer
agacauuccaaaaucgacaag

SEQ ID NO: 16676 - RNA, 21 nt, artificial
  Oligomer
gcugaagaacaguuagcauug

SEQ ID NO: 16677 - RNA, 21 nt, artificial
  Oligomer
aagcugaagaacaguuagcau

SEQ ID NO: 16678 - RNA, 21 nt, artificial
  Oligomer
cuguuugccugugagguguua

SEQ ID NO: 16679 - RNA, 21 nt, artificial
  Oligomer
guucaagcuguuugccuguga

SEQ ID NO: 16680 - RNA, 21 nt, artificial
  Oligomer
cugauagacuauaagauccug

SEQ ID NO: 16681 - RNA, 21 nt, artificial
  Oligomer
gcugauagacuauaagauccu

SEQ ID NO: 16682 - RNA, 21 nt, artificial
  Oligomer
ggcuaucaaagaccuuaaaga

SEQ ID NO: 16683 - RNA, 21 nt, artificial
  Oligomer
gggaugcucuacuaccagaca

SEQ ID NO: 16684 - RNA, 21 nt, artificial
  Oligomer
cacuuggcaguggcuuacuuc

SEQ ID NO: 16685 - RNA, 21 nt, artificial
  Oligomer
ccuuauagguuacucauaagg

SEQ ID NO: 16686 - RNA, 21 nt, artificial
  Oligomer
ugaaguaaccuuauagguuac

SEQ ID NO: 16687 - RNA, 21 nt, artificial
  Oligomer
uaaggcuugaaguaaccuuau

SEQ ID NO: 16688 - RNA, 21 nt, artificial
  Oligomer
caaauauuccuguuucugaac

SEQ ID NO: 16689 - RNA, 21 nt, artificial
  Oligomer
cuguguucacacuguaaacau

SEQ ID NO: 16690 - RNA, 21 nt, artificial
  Oligomer
cagguacugauccuguuucuu

SEQ ID NO: 16691 - RNA, 21 nt, artificial
  Oligomer
uuagcacccuucugcuguaua

SEQ ID NO: 16692 - RNA, 21 nt, artificial
  Oligomer
ugaagcccuauuacuuguuug

SEQ ID NO: 16693 - RNA, 21 nt, artificial
  Oligomer
gaaaaugaagcccuauuacuu

SEQ ID NO: 16694 - RNA, 21 nt, artificial
  Oligomer
uucacaaacuacaaagcugaa

SEQ ID NO: 16695 - RNA, 21 nt, artificial
  Oligomer
acucggagagaagucuaggau

SEQ ID NO: 16696 - RNA, 21 nt, artificial
  Oligomer
gcccagaaagugaacaccuug

SEQ ID NO: 16697 - RNA, 21 nt, artificial
  Oligomer
uucaguuaugaggcuacccaa

SEQ ID NO: 16698 - RNA, 21 nt, artificial
  Oligomer
gugcacuacaaguacacggua

SEQ ID NO: 16699 - RNA, 21 nt, artificial
  Oligomer
ccuaaggaagugaagcucagu

SEQ ID NO: 16700 - RNA, 21 nt, artificial
  Oligomer
gccuaaggaagugaagcucag

SEQ ID NO: 16701 - RNA, 21 nt, artificial
  Oligomer
agccuaaggaagugaagcuca

SEQ ID NO: 16702 - RNA, 21 nt, artificial
  Oligomer
caccgugugcuauuuggguuu

SEQ ID NO: 16703 - RNA, 21 nt, artificial
  Oligomer
cugugguggaucaagacaguu

SEQ ID NO: 16704 - RNA, 21 nt, artificial
  Oligomer
ugggcaagcuguuucgaccaa

SEQ ID NO: 16705 - RNA, 21 nt, artificial
  Oligomer
gugugucuggaagcagaagcu

SEQ ID NO: 16706 - RNA, 21 nt, artificial
  Oligomer
uccaaaaucgacaaggcgaug

SEQ ID NO: 16707 - RNA, 21 nt, artificial
  Oligomer
cugagcccagacauuccaaaa

SEQ ID NO: 16708 - RNA, 21 nt, artificial
  Oligomer
cagcugauagacuauaagauc

SEQ ID NO: 16709 - RNA, 21 nt, artificial
  Oligomer
agggaaccagcugauagacua

SEQ ID NO: 16710 - RNA, 21 nt, artificial
  Oligomer
ucaaagaccuuaaagaagccu

SEQ ID NO: 16711 - RNA, 21 nt, artificial
  Oligomer
agcacuuggcaguggcuuacu

SEQ ID NO: 16712 - RNA, 21 nt, artificial
  Oligomer
ugaagcagagaaggccuuuac

SEQ ID NO: 16713 - RNA, 21 nt, artificial
  Oligomer
acugaagcagagaaggccuuu

SEQ ID NO: 16714 - RNA, 21 nt, artificial
  Oligomer
cucccggauuugcuucaacau

SEQ ID NO: 16715 - RNA, 21 nt, artificial
  Oligomer
gaaguaaccuuauagguuacu

SEQ ID NO: 16716 - RNA, 21 nt, artificial
  Oligomer
ggcuugaaguaaccuuauagg

SEQ ID NO: 16717 - RNA, 21 nt, artificial
  Oligomer
uuaaggcuugaaguaaccuua

SEQ ID NO: 16718 - RNA, 21 nt, artificial
  Oligomer
ugcacuuuucugugucauacc

SEQ ID NO: 16719 - RNA, 21 nt, artificial
  Oligomer
caagcuguacauuuggugcac

SEQ ID NO: 16720 - RNA, 21 nt, artificial
  Oligomer
guguucacacuguaaacauuc

SEQ ID NO: 16721 - RNA, 21 nt, artificial
  Oligomer
agcucucuuggccuccuaguu

SEQ ID NO: 16722 - RNA, 21 nt, artificial
  Oligomer
augaagcccuauuacuuguuu

SEQ ID NO: 16723 - RNA, 21 nt, artificial
  Oligomer
ggaaagcacucggagagaagu

SEQ ID NO: 16724 - RNA, 21 nt, artificial
  Oligomer
cugcgcaacuacagauuugga

SEQ ID NO: 16725 - RNA, 21 nt, artificial
  Oligomer
ggcccagaaagugaacaccuu

SEQ ID NO: 16726 - RNA, 21 nt, artificial
  Oligomer
cucaaggugcacuacaaguac

SEQ ID NO: 16727 - RNA, 21 nt, artificial
  Oligomer
agugaagcucaguguucccau

SEQ ID NO: 16728 - RNA, 21 nt, artificial
  Oligomer
ugcaacuaccuugaaccaguu

SEQ ID NO: 16729 - RNA, 21 nt, artificial
  Oligomer
gcuuguucccugcaacuaccu

SEQ ID NO: 16730 - RNA, 21 nt, artificial
  Oligomer
aggcucaccgugugcuauuug

SEQ ID NO: 16731 - RNA, 21 nt, artificial
  Oligomer
gcuggccaagaaggauuaccu

SEQ ID NO: 16732 - RNA, 21 nt, artificial
  Oligomer
cauuuccugaugcauuugcaa

SEQ ID NO: 16733 - RNA, 21 nt, artificial
  Oligomer
cagaagcuauaugagccagug

SEQ ID NO: 16734 - RNA, 21 nt, artificial
  Oligomer
gagcccagacauuccaaaauc

SEQ ID NO: 16735 - RNA, 21 nt, artificial
  Oligomer
gcucuacuaccagacagagaa

SEQ ID NO: 16736 - RNA, 21 nt, artificial
  Oligomer
accagaagcauuaaccgagac

SEQ ID NO: 16737 - RNA, 21 nt, artificial
  Oligomer
gcuugaaguaaccuuauaggu

SEQ ID NO: 16738 - RNA, 21 nt, artificial
  Oligomer
ucuugcucugagugcuagcua

SEQ ID NO: 16739 - RNA, 21 nt, artificial
  Oligomer
ccagaaagugaacaccuuggg

SEQ ID NO: 16740 - RNA, 21 nt, artificial
  Oligomer
uccugguguuaucaaagguga

SEQ ID NO: 16741 - RNA, 21 nt, artificial
  Oligomer
caaccagaggaccuggaguuu

SEQ ID NO: 16742 - RNA, 21 nt, artificial
  Oligomer
ggugcacuacaaguacacggu

SEQ ID NO: 16743 - RNA, 21 nt, artificial
  Oligomer
gcaacuaccuugaaccaguug

SEQ ID NO: 16744 - RNA, 21 nt, artificial
  Oligomer
gucugagcccagacauuccaa

SEQ ID NO: 16745 - RNA, 21 nt, artificial
  Oligomer
ccaguucaagcuguuugccug

SEQ ID NO: 16746 - RNA, 21 nt, artificial
  Oligomer
ggaugcucuacuaccagacag

SEQ ID NO: 16747 - RNA, 21 nt, artificial
  Oligomer
agggaugcucuacuaccagac

SEQ ID NO: 16748 - RNA, 21 nt, artificial
  Oligomer
gccuuuaccagaagcauuaac

SEQ ID NO: 16749 - RNA, 21 nt, artificial
  Oligomer
aggccuuuaccagaagcauua

SEQ ID NO: 16750 - RNA, 21 nt, artificial
  Oligomer
gaaccauuacuguaauuggcu

SEQ ID NO: 16751 - RNA, 21 nt, artificial
  Oligomer
agcaucuuacaaaaacaagac

SEQ ID NO: 16752 - RNA, 21 nt, artificial
  Oligomer
cuagcuagccagcuguguuca

SEQ ID NO: 16753 - RNA, 21 nt, artificial
  Oligomer
ccauucuacucaucuggccca

SEQ ID NO: 16754 - RNA, 21 nt, artificial
  Oligomer
ucagcuggccaagaaggauua

SEQ ID NO: 16755 - RNA, 21 nt, artificial
  Oligomer
caguucaagcuguuugccugu

SEQ ID NO: 16756 - RNA, 21 nt, artificial
  Oligomer
cucuuaaggcuugaaguaacc

SEQ ID NO: 16757 - RNA, 21 nt, artificial
  Oligomer
accauuacuguaauuggcucu

SEQ ID NO: 16758 - RNA, 21 nt, artificial
  Oligomer
ccuguuucugaaccauuacug

SEQ ID NO: 16759 - RNA, 21 nt, artificial
  Oligomer
uccaggcccaaggaguaagua

SEQ ID NO: 16760 - RNA, 21 nt, artificial
  Oligomer
gagagucuuccagguacugau

SEQ ID NO: 16761 - RNA, 21 nt, artificial
  Oligomer
agcccuauuacuuguuuguaa

SEQ ID NO: 16762 - RNA, 21 nt, artificial
  Oligomer
gaagcccuauuacuuguuugu

SEQ ID NO: 16763 - RNA, 21 nt, artificial
  Oligomer
cacuacaaguacacgguaguc

SEQ ID NO: 16764 - RNA, 21 nt, artificial
  Oligomer
agggcaaugauaacugggcca

SEQ ID NO: 16765 - RNA, 21 nt, artificial
  Oligomer
ucaccgugugcuauuuggguu

SEQ ID NO: 16766 - RNA, 21 nt, artificial
  Oligomer
uuggcuaucaaagaccuuaaa

SEQ ID NO: 16767 - RNA, 21 nt, artificial
  Oligomer
gcacccuucugcuguauacug

SEQ ID NO: 16768 - RNA, 21 nt, artificial
  Oligomer
agcacccuucugcuguauacu

SEQ ID NO: 16769 - RNA, 21 nt, artificial
  Oligomer
uggaaaaaagcugaagaacag

SEQ ID NO: 16770 - RNA, 21 nt, artificial
  Oligomer
ggcuccaguucaagcuguuug

SEQ ID NO: 16771 - RNA, 21 nt, artificial
  Oligomer
gauuuggcuaucaaagaccuu

SEQ ID NO: 16772 - RNA, 21 nt, artificial
  Oligomer
ugacugaagcagagaaggccu

SEQ ID NO: 16773 - RNA, 21 nt, artificial
  Oligomer
cuguuucugaaccauuacugu

SEQ ID NO: 16774 - RNA, 21 nt, artificial
  Oligomer
gacucuguggugugagaacac

SEQ ID NO: 16775 - RNA, 21 nt, artificial
  Oligomer
gcuguuugccugugagguguu

SEQ ID NO: 16776 - RNA, 21 nt, artificial
  Oligomer
cucucaugguaggguuaugag

SEQ ID NO: 16777 - RNA, 21 nt, artificial
  Oligomer
acauuggcugcauguacacua

SEQ ID NO: 16778 - RNA, 21 nt, artificial
  Oligomer
aagcccuauuacuuguuugua

SEQ ID NO: 16779 - RNA, 21 nt, artificial
  Oligomer
gccaagaaggaggaauggaaa

SEQ ID NO: 16780 - RNA, 21 nt, artificial
  Oligomer
aggucaugccagggaacauug

SEQ ID NO: 16781 - RNA, 21 nt, artificial
  Oligomer
ugcuagcuagccagcuguguu

SEQ ID NO: 16782 - RNA, 21 nt, artificial
  Oligomer
cagcuuaagaaaggcagccaa

SEQ ID NO: 16783 - RNA, 21 nt, artificial
  Oligomer
ugccaagaaggaggaauggaa

SEQ ID NO: 16784 - RNA, 21 nt, artificial
  Oligomer
uggcuaucaaagaccuuaaag

SEQ ID NO: 16785 - RNA, 21 nt, artificial
  Oligomer
ugauuuggcuaucaaagaccu

SEQ ID NO: 16786 - RNA, 21 nt, artificial
  Oligomer
agaaggccuuuaccagaagca

SEQ ID NO: 16787 - RNA, 21 nt, artificial
  Oligomer
cagagaaggccuuuaccagaa

SEQ ID NO: 16788 - RNA, 21 nt, artificial
  Oligomer
gcagagaaggccuuuaccaga

SEQ ID NO: 16789 - RNA, 21 nt, artificial
  Oligomer
auauuccuguuucugaaccau

SEQ ID NO: 16790 - RNA, 21 nt, artificial
  Oligomer
agcuuaagaaaggcagccaag

SEQ ID NO: 16791 - RNA, 21 nt, artificial
  Oligomer
ucagcuuaagaaaggcagcca

SEQ ID NO: 16792 - RNA, 21 nt, artificial
  Oligomer
caggucaugccagggaacauu

SEQ ID NO: 16793 - RNA, 21 nt, artificial
  Oligomer
cuagcaucuuacaaaaacaag

SEQ ID NO: 16794 - RNA, 21 nt, artificial
  Oligomer
agagucaggcaguaguuuuuc

SEQ ID NO: 16795 - RNA, 21 nt, artificial
  Oligomer
aaaucauauuucucugucugg

SEQ ID NO: 16796 - RNA, 21 nt, artificial
  Oligomer
ucuucaggauaguguacaugc

SEQ ID NO: 16797 - RNA, 21 nt, artificial
  Oligomer
uuuuucacuuuccuuggguuc

SEQ ID NO: 16798 - RNA, 21 nt, artificial
  Oligomer
ugguucaagguaguugcaggg

SEQ ID NO: 16799 - RNA, 21 nt, artificial
  Oligomer
auauuuguacuuacuccuugg

SEQ ID NO: 16800 - RNA, 21 nt, artificial
  Oligomer
uuuccaaaucuguaguugcgc

SEQ ID NO: 16801 - RNA, 21 nt, artificial
  Oligomer
uuccuuaggcucuucuuuuug

SEQ ID NO: 16802 - RNA, 21 nt, artificial
  Oligomer
cacuugucucucauuuggucg

SEQ ID NO: 16803 - RNA, 21 nt, artificial
  Oligomer
aacauccuagacuucucuccg

SEQ ID NO: 16804 - RNA, 21 nt, artificial
  Oligomer
ucauaacugaagagugccucc

SEQ ID NO: 16805 - RNA, 21 nt, artificial
  Oligomer
cagcuuuuucacuuuccuugg

SEQ ID NO: 16806 - RNA, 21 nt, artificial
  Oligomer
uucugcccguugaacaugacc

SEQ ID NO: 16807 - RNA, 21 nt, artificial
  Oligomer
uucaagacaaagacaauguuc

SEQ ID NO: 16808 - RNA, 21 nt, artificial
  Oligomer
uucaggauaguguacaugcag

SEQ ID NO: 16809 - RNA, 21 nt, artificial
  Oligomer
aauguacagcuugaugaaugu

SEQ ID NO: 16810 - RNA, 21 nt, artificial
  Oligomer
uugugaaacauccuagacuuc

SEQ ID NO: 16811 - RNA, 21 nt, artificial
  Oligomer
uucacuuccuuaggcucuucu

SEQ ID NO: 16812 - RNA, 21 nt, artificial
  Oligomer
uucuuuuuguuucuggccugg

SEQ ID NO: 16813 - RNA, 21 nt, artificial
  Oligomer
uauuucucugucugguaguag

SEQ ID NO: 16814 - RNA, 21 nt, artificial
  Oligomer
uucuucaggauaguguacaug

SEQ ID NO: 16815 - RNA, 21 nt, artificial
  Oligomer
uauaugccuuaugaguaaccu

SEQ ID NO: 16816 - RNA, 21 nt, artificial
  Oligomer
uacagcuugaugaauguuuac

SEQ ID NO: 16817 - RNA, 21 nt, artificial
  Oligomer
uugaugaauguuuacagugug

SEQ ID NO: 16818 - RNA, 21 nt, artificial
  Oligomer
gucuucaacaaaaacuuuggg

SEQ ID NO: 16819 - RNA, 21 nt, artificial
  Oligomer
uucuguugucugguuauuagc

SEQ ID NO: 16820 - RNA, 21 nt, artificial
  Oligomer
ucacuuuccuuggguucaucu

SEQ ID NO: 16821 - RNA, 21 nt, artificial
  Oligomer
acuuuccuuggguucaucugg

SEQ ID NO: 16822 - RNA, 21 nt, artificial
  Oligomer
cauuuggucgaaacagcuugc

SEQ ID NO: 16823 - RNA, 21 nt, artificial
  Oligomer
agugcuugucucgguuaaugc

SEQ ID NO: 16824 - RNA, 21 nt, artificial
  Oligomer
ugucucgguuaaugcuucugg

SEQ ID NO: 16825 - RNA, 21 nt, artificial
  Oligomer
aguaccuggaagacucucucg

SEQ ID NO: 16826 - RNA, 21 nt, artificial
  Oligomer
augucucaguacaguauacag

SEQ ID NO: 16827 - RNA, 21 nt, artificial
  Oligomer
uuuguaguuugugaaacaucc

SEQ ID NO: 16828 - RNA, 21 nt, artificial
  Oligomer
aaaggaaagaagcagagagag

SEQ ID NO: 16829 - RNA, 21 nt, artificial
  Oligomer
aaacauccuagacuucucucc

SEQ ID NO: 16830 - RNA, 21 nt, artificial
  Oligomer
agucuucaacaaaaacuuugg

SEQ ID NO: 16831 - RNA, 21 nt, artificial
  Oligomer
uuccagccauucuucauucac

SEQ ID NO: 16832 - RNA, 21 nt, artificial
  Oligomer
uucaccuuugauaacaccagg

SEQ ID NO: 16833 - RNA, 21 nt, artificial
  Oligomer
auaacugaagagugccuccac

SEQ ID NO: 16834 - RNA, 21 nt, artificial
  Oligomer
uuuucacuuuccuuggguuca

SEQ ID NO: 16835 - RNA, 21 nt, artificial
  Oligomer
uucacuuuccuuggguucauc

SEQ ID NO: 16836 - RNA, 21 nt, artificial
  Oligomer
aucauugcccuucuucaagac

SEQ ID NO: 16837 - RNA, 21 nt, artificial
  Oligomer
aacuucucaguguugcaaaug

SEQ ID NO: 16838 - RNA, 21 nt, artificial
  Oligomer
caagacaaagacaauguuccc

SEQ ID NO: 16839 - RNA, 21 nt, artificial
  Oligomer
gaaucaaggcuucuuuaaggu

SEQ ID NO: 16840 - RNA, 21 nt, artificial
  Oligomer
uucuuuaaggucuuugauagc

SEQ ID NO: 16841 - RNA, 21 nt, artificial
  Oligomer
uagccaaaucauauuucucug

SEQ ID NO: 16842 - RNA, 21 nt, artificial
  Oligomer
uugaagcaaauccgggagugg

SEQ ID NO: 16843 - RNA, 21 nt, artificial
  Oligomer
gacacuuccauccacuuuucc

SEQ ID NO: 16844 - RNA, 21 nt, artificial
  Oligomer
uuccauccacuuuuccucucc

SEQ ID NO: 16845 - RNA, 21 nt, artificial
  Oligomer
cuggguacucacaucauuguc

SEQ ID NO: 16846 - RNA, 21 nt, artificial
  Oligomer
guuauuagcaucagcuuuuuc

SEQ ID NO: 16847 - RNA, 21 nt, artificial
  Oligomer
agcuuuuucacuuuccuuggg

SEQ ID NO: 16848 - RNA, 21 nt, artificial
  Oligomer
cuucacuuccuuaggcucuuc

SEQ ID NO: 16849 - RNA, 21 nt, artificial
  Oligomer
gaccuggagcucuucuuuugu

SEQ ID NO: 16850 - RNA, 21 nt, artificial
  Oligomer
auaugccuuaugaguaaccua

SEQ ID NO: 16851 - RNA, 21 nt, artificial
  Oligomer
auguacagcuugaugaauguu

SEQ ID NO: 16852 - RNA, 21 nt, artificial
  Oligomer
ugaugaauguuuacaguguga

SEQ ID NO: 16853 - RNA, 21 nt, artificial
  Oligomer
uaccuggaagacucucucgug

SEQ ID NO: 16854 - RNA, 21 nt, artificial
  Oligomer
aacuccuccauucaccugucc

SEQ ID NO: 16855 - RNA, 21 nt, artificial
  Oligomer
cucacaucauugucuaguagg

SEQ ID NO: 16856 - RNA, 21 nt, artificial
  Oligomer
aaaugcccaccuucccuuugc

SEQ ID NO: 16857 - RNA, 21 nt, artificial
  Oligomer
cuuccagccauucuucauuca

SEQ ID NO: 16858 - RNA, 21 nt, artificial
  Oligomer
aucagcuuuuucacuuuccuu

SEQ ID NO: 16859 - RNA, 21 nt, artificial
  Oligomer
auccuucaugcugucuucuga

SEQ ID NO: 16860 - RNA, 21 nt, artificial
  Oligomer
cuucugcccguugaacaugac

SEQ ID NO: 16861 - RNA, 21 nt, artificial
  Oligomer
acuucucaguguugcaaaugc

SEQ ID NO: 16862 - RNA, 21 nt, artificial
  Oligomer
cuggagcucuucuuuugucuc

SEQ ID NO: 16863 - RNA, 21 nt, artificial
  Oligomer
agcucuucuuuugucucaggc

SEQ ID NO: 16864 - RNA, 21 nt, artificial
  Oligomer
uugauccaccacagaugccac

SEQ ID NO: 16865 - RNA, 21 nt, artificial
  Oligomer
ugaaucaaggcuucuuuaagg

SEQ ID NO: 16866 - RNA, 21 nt, artificial
  Oligomer
agccaaaucauauuucucugu

SEQ ID NO: 16867 - RNA, 21 nt, artificial
  Oligomer
cuugucucgguuaaugcuucu

SEQ ID NO: 16868 - RNA, 21 nt, artificial
  Oligomer
uugucucgguuaaugcuucug

SEQ ID NO: 16869 - RNA, 21 nt, artificial
  Oligomer
uuccaguccuucuuguccgcu

SEQ ID NO: 16870 - RNA, 21 nt, artificial
  Oligomer
guauaugccuuaugaguaacc

SEQ ID NO: 16871 - RNA, 21 nt, artificial
  Oligomer
ucauccuggguacucacauca

SEQ ID NO: 16872 - RNA, 21 nt, artificial
  Oligomer
uccuggguacucacaucauug

SEQ ID NO: 16873 - RNA, 21 nt, artificial
  Oligomer
aacacuuccaaacuguaaugu

SEQ ID NO: 16874 - RNA, 21 nt, artificial
  Oligomer
uaaugucucaguacaguauac

SEQ ID NO: 16875 - RNA, 21 nt, artificial
  Oligomer
aaugucucaguacaguauaca

SEQ ID NO: 16876 - RNA, 21 nt, artificial
  Oligomer
uuugugaaacauccuagacuu

SEQ ID NO: 16877 - RNA, 21 nt, artificial
  Oligomer
ugaaacauccuagacuucucu

SEQ ID NO: 16878 - RNA, 21 nt, artificial
  Oligomer
ugcuuuccaaaucuguaguug

SEQ ID NO: 16879 - RNA, 21 nt, artificial
  Oligomer
gcuuuccaaaucuguaguugc

SEQ ID NO: 16880 - RNA, 21 nt, artificial
  Oligomer
cauucaccuuugauaacacca

SEQ ID NO: 16881 - RNA, 21 nt, artificial
  Oligomer
uuuuuguuucuggccugguga

SEQ ID NO: 16882 - RNA, 21 nt, artificial
  Oligomer
ucuucaagacaaagacaaugu

SEQ ID NO: 16883 - RNA, 21 nt, artificial
  Oligomer
gacaaagacaauguucccugg

SEQ ID NO: 16884 - RNA, 21 nt, artificial
  Oligomer
acaaacccaaauagcacacgg

SEQ ID NO: 16885 - RNA, 21 nt, artificial
  Oligomer
ucuugauccaccacagaugcc

SEQ ID NO: 16886 - RNA, 21 nt, artificial
  Oligomer
ucucauuuggucgaaacagcu

SEQ ID NO: 16887 - RNA, 21 nt, artificial
  Oligomer
caaaucauauuucucugucug

SEQ ID NO: 16888 - RNA, 21 nt, artificial
  Oligomer
aaucauauuucucugucuggu

SEQ ID NO: 16889 - RNA, 21 nt, artificial
  Oligomer
uaguagagcaucccucguugg

SEQ ID NO: 16890 - RNA, 21 nt, artificial
  Oligomer
uuacuucaagccuuaagagcc

SEQ ID NO: 16891 - RNA, 21 nt, artificial
  Oligomer
cagcuugaugaauguuuacag

SEQ ID NO: 16892 - RNA, 21 nt, artificial
  Oligomer
agcuugaugaauguuuacagu

SEQ ID NO: 16893 - RNA, 21 nt, artificial
  Oligomer
gucucaguacaguauacagca

SEQ ID NO: 16894 - RNA, 21 nt, artificial
  Oligomer
gaaacauccuagacuucucuc

SEQ ID NO: 16895 - RNA, 21 nt, artificial
  Oligomer
cuuuccaaaucuguaguugcg

SEQ ID NO: 16896 - RNA, 21 nt, artificial
  Oligomer
aaugcccaccuucccuuugca

SEQ ID NO: 16897 - RNA, 21 nt, artificial
  Oligomer
auucaccuuugauaacaccag

SEQ ID NO: 16898 - RNA, 21 nt, artificial
  Oligomer
ucuuaagcugagguucuguug

SEQ ID NO: 16899 - RNA, 21 nt, artificial
  Oligomer
caucagcuuuuucacuuuccu

SEQ ID NO: 16900 - RNA, 21 nt, artificial
  Oligomer
cuuaagauaacuucucagugu

SEQ ID NO: 16901 - RNA, 21 nt, artificial
  Oligomer
accguggcccaguuaucauug

SEQ ID NO: 16902 - RNA, 21 nt, artificial
  Oligomer
ucaagacaaagacaauguucc

SEQ ID NO: 16903 - RNA, 21 nt, artificial
  Oligomer
acaaagacaauguucccuggc

SEQ ID NO: 16904 - RNA, 21 nt, artificial
  Oligomer
agaaacugucuugauccacca

SEQ ID NO: 16905 - RNA, 21 nt, artificial
  Oligomer
cuuuccagacacuuccaucca

SEQ ID NO: 16906 - RNA, 21 nt, artificial
  Oligomer
uuuccagacacuuccauccac

SEQ ID NO: 16907 - RNA, 21 nt, artificial
  Oligomer
agacacuuccauccacuuuuc

SEQ ID NO: 16908 - RNA, 21 nt, artificial
  Oligomer
acuuccauccacuuuuccucu

SEQ ID NO: 16909 - RNA, 21 nt, artificial
  Oligomer
uccauccacuuuuccucuccc

SEQ ID NO: 16910 - RNA, 21 nt, artificial
  Oligomer
gaaaucauccuggguacucac

SEQ ID NO: 16911 - RNA, 21 nt, artificial
  Oligomer
uacaguauacagcagaagggu

SEQ ID NO: 16912 - RNA, 21 nt, artificial
  Oligomer
cuucucuccgagugcuuucca

SEQ ID NO: 16913 - RNA, 21 nt, artificial
  Oligomer
uuccaaaucuguaguugcgca

SEQ ID NO: 16914 - RNA, 21 nt, artificial
  Oligomer
aaaaugcccaccuucccuuug

SEQ ID NO: 16915 - RNA, 21 nt, artificial
  Oligomer
uaagcugagguucuguugucu

SEQ ID NO: 16916 - RNA, 21 nt, artificial
  Oligomer
agcucagcuuaguguguucca

SEQ ID NO: 16917 - RNA, 21 nt, artificial
  Oligomer
agccucccuuaagauaacuuc

SEQ ID NO: 16918 - RNA, 21 nt, artificial
  Oligomer
ccuuaagauaacuucucagug

SEQ ID NO: 16919 - RNA, 21 nt, artificial
  Oligomer
gaaacugucuugauccaccac

SEQ ID NO: 16920 - RNA, 21 nt, artificial
  Oligomer
aucaccacuggcucauauagc

SEQ ID NO: 16921 - RNA, 21 nt, artificial
  Oligomer
uucuucagcuuuuuuccauuc

SEQ ID NO: 16922 - RNA, 21 nt, artificial
  Oligomer
ucuucagcuuuuuuccauucc

SEQ ID NO: 16923 - RNA, 21 nt, artificial
  Oligomer
ucagcuuuuuuccauuccucc

SEQ ID NO: 16924 - RNA, 21 nt, artificial
  Oligomer
ucugcuucagucauguucuuc

SEQ ID NO: 16925 - RNA, 21 nt, artificial
  Oligomer
ugcuucagucauguucuucag

SEQ ID NO: 16926 - RNA, 21 nt, artificial
  Oligomer
caggaauauuuguacuuacuc

SEQ ID NO: 16927 - RNA, 21 nt, artificial
  Oligomer
auuuguacuuacuccuugggc

SEQ ID NO: 16928 - RNA, 21 nt, artificial
  Oligomer
uugggugucuuguuuuuguaa

SEQ ID NO: 16929 - RNA, 21 nt, artificial
  Oligomer
agcaagaaacaggaucaguac

SEQ ID NO: 16930 - RNA, 21 nt, artificial
  Oligomer
uuccagacacuuccauccacu

SEQ ID NO: 16931 - RNA, 21 nt, artificial
  Oligomer
acacuuccaaacuguaauguc

SEQ ID NO: 16932 - RNA, 21 nt, artificial
  Oligomer
acuuccaaacuguaaugucuc

SEQ ID NO: 16933 - RNA, 21 nt, artificial
  Oligomer
ugucucaguacaguauacagc

SEQ ID NO: 16934 - RNA, 21 nt, artificial
  Oligomer
aguacaguauacagcagaagg

SEQ ID NO: 16935 - RNA, 21 nt, artificial
  Oligomer
aagcugagguucuguugucug

SEQ ID NO: 16936 - RNA, 21 nt, artificial
  Oligomer
cucagcuuaguguguuccagc

SEQ ID NO: 16937 - RNA, 21 nt, artificial
  Oligomer
cucccuuaagauaacuucuca

SEQ ID NO: 16938 - RNA, 21 nt, artificial
  Oligomer
ucccuuaagauaacuucucag

SEQ ID NO: 16939 - RNA, 21 nt, artificial
  Oligomer
cuucuuuuuguuucuggccug

SEQ ID NO: 16940 - RNA, 21 nt, artificial
  Oligomer
ucuuuuuguuucuggccuggu

SEQ ID NO: 16941 - RNA, 21 nt, artificial
  Oligomer
aagacaaagacaauguucccu

SEQ ID NO: 16942 - RNA, 21 nt, artificial
  Oligomer
ucaggcacaaacccaaauagc

SEQ ID NO: 16943 - RNA, 21 nt, artificial
  Oligomer
cacaaacccaaauagcacacg

SEQ ID NO: 16944 - RNA, 21 nt, artificial
  Oligomer
uucucugcuucagucauguuc

SEQ ID NO: 16945 - RNA, 21 nt, artificial
  Oligomer
ucucugcuucagucauguucu

SEQ ID NO: 16946 - RNA, 21 nt, artificial
  Oligomer
uacuucaagccuuaagagcca

SEQ ID NO: 16947 - RNA, 21 nt, artificial
  Oligomer
cuuaagagccaauuacaguaa

SEQ ID NO: 16948 - RNA, 21 nt, artificial
  Oligomer
uauuuguacuuacuccuuggg

SEQ ID NO: 16949 - RNA, 21 nt, artificial
  Oligomer
caguaccuggaagacucucuc

SEQ ID NO: 16950 - RNA, 21 nt, artificial
  Oligomer
ugcccuuuccagacacuucca

SEQ ID NO: 16951 - RNA, 21 nt, artificial
  Oligomer
uaacacuuccaaacuguaaug

SEQ ID NO: 16952 - RNA, 21 nt, artificial
  Oligomer
cuccgagugcuuuccaaaucu

SEQ ID NO: 16953 - RNA, 21 nt, artificial
  Oligomer
uccgagugcuuuccaaaucug

SEQ ID NO: 16954 - RNA, 21 nt, artificial
  Oligomer
gagagagaaaaggaaagaagc

SEQ ID NO: 16955 - RNA, 21 nt, artificial
  Oligomer
aacacugagcuucacuuccuu

SEQ ID NO: 16956 - RNA, 21 nt, artificial
  Oligomer
uugcccuucuucaagacaaag

SEQ ID NO: 16957 - RNA, 21 nt, artificial
  Oligomer
agacaaagacaauguucccug

SEQ ID NO: 16958 - RNA, 21 nt, artificial
  Oligomer
ucauauagcuucugcuuccag

SEQ ID NO: 16959 - RNA, 21 nt, artificial
  Oligomer
gccaaugcuaacuguucuuca

SEQ ID NO: 16960 - RNA, 21 nt, artificial
  Oligomer
uucagcuuuuuuccauuccuc

SEQ ID NO: 16961 - RNA, 21 nt, artificial
  Oligomer
gcuucagucauguucuucagg

SEQ ID NO: 16962 - RNA, 21 nt, artificial
  Oligomer
aagccuuaagagccaauuaca

SEQ ID NO: 16963 - RNA, 21 nt, artificial
  Oligomer
uaagagccaauuacaguaaug

SEQ ID NO: 16964 - RNA, 21 nt, artificial
  Oligomer
ucagagcaagaaacaggauca

SEQ ID NO: 16965 - RNA, 21 nt, artificial
  Oligomer
uaacuccuccauucaccuguc

SEQ ID NO: 16966 - RNA, 21 nt, artificial
  Oligomer
auaguuaacacuuccaaacug

SEQ ID NO: 16967 - RNA, 21 nt, artificial
  Oligomer
guacaguauacagcagaaggg

SEQ ID NO: 16968 - RNA, 21 nt, artificial
  Oligomer
aguaauagggcuucauuuucu

SEQ ID NO: 16969 - RNA, 21 nt, artificial
  Oligomer
uaauagggcuucauuuucuuc

SEQ ID NO: 16970 - RNA, 21 nt, artificial
  Oligomer
ugauaacaccaggauuauauc

SEQ ID NO: 16971 - RNA, 21 nt, artificial
  Oligomer
uuaagcugagguucuguuguc

SEQ ID NO: 16972 - RNA, 21 nt, artificial
  Oligomer
agcugagguucuguugucugg

SEQ ID NO: 16973 - RNA, 21 nt, artificial
  Oligomer
cucuucuuuuuguuucuggcc

SEQ ID NO: 16974 - RNA, 21 nt, artificial
  Oligomer
caguuaucauugcccuucuuc

SEQ ID NO: 16975 - RNA, 21 nt, artificial
  Oligomer
cucaggcacaaacccaaauag

SEQ ID NO: 16976 - RNA, 21 nt, artificial
  Oligomer
aacugacucauaacccuacca

SEQ ID NO: 16977 - RNA, 21 nt, artificial
  Oligomer
cuaccaugagagagaaaagga

SEQ ID NO: 16978 - RNA, 21 nt, artificial
  Oligomer
guugaagcaaauccgggagug

SEQ ID NO: 16979 - RNA, 21 nt, artificial
  Oligomer
guuacuucaagccuuaagagc

SEQ ID NO: 16980 - RNA, 21 nt, artificial
  Oligomer
cacucagagcaagaaacagga

SEQ ID NO: 16981 - RNA, 21 nt, artificial
  Oligomer
cagagcaagaaacaggaucag

SEQ ID NO: 16982 - RNA, 21 nt, artificial
  Oligomer
cagagagaagacagguuggag

SEQ ID NO: 16983 - RNA, 21 nt, artificial
  Oligomer
uaggcucuucuuuuuguuucu

SEQ ID NO: 16984 - RNA, 21 nt, artificial
  Oligomer
caaacccaaauagcacacggu

SEQ ID NO: 16985 - RNA, 21 nt, artificial
  Oligomer
caacugacucauaacccuacc

SEQ ID NO: 16986 - RNA, 21 nt, artificial
  Oligomer
acucagagcaagaaacaggau

SEQ ID NO: 16987 - RNA, 21 nt, artificial
  Oligomer
cagggaauaaauaguuaacac

SEQ ID NO: 16988 - RNA, 21 nt, artificial
  Oligomer
uauuagcaucagcuuuuucac

SEQ ID NO: 16989 - RNA, 21 nt, artificial
  Oligomer
uuucuuagacaccaugucccg

SEQ ID NO: 16990 - RNA, 21 nt, artificial
  Oligomer
cauuccuccuucuuggcauac

SEQ ID NO: 16991 - RNA, 21 nt, artificial
  Oligomer
auaguguacaugcagccaaug

SEQ ID NO: 16992 - RNA, 21 nt, artificial
  Oligomer
uuggucacccacuguguucuc

SEQ ID NO: 16993 - RNA, 21 nt, artificial
  Oligomer
uuaggcucuucuuuuuguuuc

SEQ ID NO: 16994 - RNA, 21 nt, artificial
  Oligomer
ggcucuucuuuuuguuucugg

SEQ ID NO: 16995 - RNA, 21 nt, artificial
  Oligomer
cuucagcuuuuuuccauuccu

SEQ ID NO: 16996 - RNA, 21 nt, artificial
  Oligomer
uaacccuaccaugagagagaa

SEQ ID NO: 16997 - RNA, 21 nt, artificial
  Oligomer
uuuguacuuacuccuugggcc

SEQ ID NO: 16998 - RNA, 21 nt, artificial
  Oligomer
augauuagguagaaacuagga

SEQ ID NO: 16999 - RNA, 21 nt, artificial
  Oligomer
auuagguagaaacuaggaggc

SEQ ID NO: 17000 - RNA, 21 nt, artificial
  Oligomer
uagggcuucauuuucuucagc

SEQ ID NO: 17001 - RNA, 21 nt, artificial
  Oligomer
aggcucuucuuuuuguuucug

SEQ ID NO: 17002 - RNA, 21 nt, artificial
  Oligomer
uuguacuuacuccuugggccu

SEQ ID NO: 17003 - RNA, 21 nt, artificial
  Oligomer
gauuagguagaaacuaggagg

SEQ ID NO: 17004 - RNA, 21 nt, artificial
  Oligomer
uuagguagaaacuaggaggcc

SEQ ID NO: 17005 - RNA, 21 nt, artificial
  Oligomer
auagggcuucauuuucuucag

SEQ ID NO: 17006 - RNA, 21 nt, artificial
  Oligomer
uuucuucagcuuuguaguuug

SEQ ID NO: 17007 - RNA, 21 nt, artificial
  Oligomer
uucuucagcuuuguaguuugu

SEQ ID NO: 17008 - RNA, 21 nt, artificial
  Oligomer
ucaugcugucuucugaaaggg

SEQ ID NO: 17009 - RNA, 21 nt, artificial
  Oligomer
gcucuucuuuuuguuucuggc

SEQ ID NO: 17010 - RNA, 21 nt, artificial
  Oligomer
aaaaggaaagaagcagagaga

SEQ ID NO: 17011 - RNA, 21 nt, artificial
  Oligomer
gccaauguugaagcaaauccg

SEQ ID NO: 17012 - RNA, 21 nt, artificial
  Oligomer
gacagagagaagacagguugg

SEQ ID NO: 17013 - RNA, 21 nt, artificial
  Oligomer
cuucauuuucuucagcuuugu

SEQ ID NO: 17014 - RNA, 21 nt, artificial
  Oligomer
uugaguguguagggcauggga

SEQ ID NO: 17015 - RNA, 21 nt, artificial
  Oligomer
uuuuccauuccuccuucuugg

SEQ ID NO: 17016 - RNA, 21 nt, artificial
  Oligomer
uuauagucuaucagcugguuc

SEQ ID NO: 17017 - RNA, 21 nt, artificial
  Oligomer
agccaauguugaagcaaaucc

SEQ ID NO: 17018 - RNA, 21 nt, artificial
  Oligomer
uuguuuuuguaagaugcuagg

SEQ ID NO: 17019 - RNA, 21 nt, artificial
  Oligomer
uaugacacagaaaagugcacc

SEQ ID NO: 17020 - RNA, 21 nt, artificial
  Oligomer
aaagugcaccaaauguacagc

SEQ ID NO: 17021 - RNA, 21 nt, artificial
  Oligomer
uuuacagugugaacacagcug

SEQ ID NO: 17022 - RNA, 21 nt, artificial
  Oligomer
aauagggcuucauuuucuuca

SEQ ID NO: 17023 - RNA, 21 nt, artificial
  Oligomer
gucaggcaguaguuuuucacc

SEQ ID NO: 17024 - RNA, 21 nt, artificial
  Oligomer
aggcaguaguuuuucaccugg

SEQ ID NO: 17025 - RNA, 21 nt, artificial
  Oligomer
uucuuagacaccaugucccgg

SEQ ID NO: 17026 - RNA, 21 nt, artificial
  Oligomer
aacuaggaggagcugggaugu

SEQ ID NO: 17027 - RNA, 21 nt, artificial
  Oligomer
acuggcucauauagcuucugc

SEQ ID NO: 17028 - RNA, 21 nt, artificial
  Oligomer
ucguuggaaguaagccacugc

SEQ ID NO: 17029 - RNA, 21 nt, artificial
  Oligomer
uguuuuuguaagaugcuaggu

SEQ ID NO: 17030 - RNA, 21 nt, artificial
  Oligomer
uuauugugguaugacacagaa

SEQ ID NO: 17031 - RNA, 21 nt, artificial
  Oligomer
uacagugugaacacagcuggc

SEQ ID NO: 17032 - RNA, 21 nt, artificial
  Oligomer
uagccucauaacugaagagug

SEQ ID NO: 17033 - RNA, 21 nt, artificial
  Oligomer
agucaggcaguaguuuuucac

SEQ ID NO: 17034 - RNA, 21 nt, artificial
  Oligomer
gagaaaaggaaagaagcagag

SEQ ID NO: 17035 - RNA, 21 nt, artificial
  Oligomer
agaaaaggaaagaagcagaga

SEQ ID NO: 17036 - RNA, 21 nt, artificial
  Oligomer
agcaauguuauauaacaccuc

SEQ ID NO: 17037 - RNA, 21 nt, artificial
  Oligomer
uuggcaacugacucauaaccc

SEQ ID NO: 17038 - RNA, 21 nt, artificial
  Oligomer
aaucaaggcuucuuuaagguc

SEQ ID NO: 17039 - RNA, 21 nt, artificial
  Oligomer
gucauguucuucaggauagug

SEQ ID NO: 17040 - RNA, 21 nt, artificial
  Oligomer
guguacaugcagccaauguug

SEQ ID NO: 17041 - RNA, 21 nt, artificial
  Oligomer
aagugcaccaaauguacagcu

SEQ ID NO: 17042 - RNA, 21 nt, artificial
  Oligomer
uuucuuaagcugagguucugu

SEQ ID NO: 17043 - RNA, 21 nt, artificial
  Oligomer
auuagcaucagcuuuuucacu

SEQ ID NO: 17044 - RNA, 21 nt, artificial
  Oligomer
cuuggguucaucuggaaagcc

SEQ ID NO: 17045 - RNA, 21 nt, artificial
  Oligomer
aguuucuuagacaccaugucc

SEQ ID NO: 17046 - RNA, 21 nt, artificial
  Oligomer
aacccagagaaacugucuuga

SEQ ID NO: 17047 - RNA, 21 nt, artificial
  Oligomer
caguguugcaaaugcaucagg

SEQ ID NO: 17048 - RNA, 21 nt, artificial
  Oligomer
auuuggucgaaacagcuugcc

SEQ ID NO: 17049 - RNA, 21 nt, artificial
  Oligomer
uuuggucgaaacagcuugccc

SEQ ID NO: 17050 - RNA, 21 nt, artificial
  Oligomer
cuuuuuuccauuccuccuucu

SEQ ID NO: 17051 - RNA, 21 nt, artificial
  Oligomer
uuuuuccauuccuccuucuug

SEQ ID NO: 17052 - RNA, 21 nt, artificial
  Oligomer
caauguuauauaacaccucac

SEQ ID NO: 17053 - RNA, 21 nt, artificial
  Oligomer
auagucuaucagcugguuccc

SEQ ID NO: 17054 - RNA, 21 nt, artificial
  Oligomer
uucauuccagaggcugauggc

SEQ ID NO: 17055 - RNA, 21 nt, artificial
  Oligomer
ugauuagguagaaacuaggag

SEQ ID NO: 17056 - RNA, 21 nt, artificial
  Oligomer
augagagagaaaaggaaagaa

SEQ ID NO: 17057 - RNA, 21 nt, artificial
  Oligomer
agacagagagaagacagguug

SEQ ID NO: 17058 - RNA, 21 nt, artificial
  Oligomer
ucuucagcuuuguaguuugug

SEQ ID NO: 17059 - RNA, 21 nt, artificial
  Oligomer
aaaucuguaguugcgcagucu

SEQ ID NO: 17060 - RNA, 21 nt, artificial
  Oligomer
uucauucaccuuugauaacac

SEQ ID NO: 17061 - RNA, 21 nt, artificial
  Oligomer
uugucugguuauuagcaucag

SEQ ID NO: 17062 - RNA, 21 nt, artificial
  Oligomer
uucaucuggaaagccuugguc

SEQ ID NO: 17063 - RNA, 21 nt, artificial
  Oligomer
uagugcaccuugaguguguag

SEQ ID NO: 17064 - RNA, 21 nt, artificial
  Oligomer
aguguugcaaaugcaucagga

SEQ ID NO: 17065 - RNA, 21 nt, artificial
  Oligomer
uugccuagguaauccuucuug

SEQ ID NO: 17066 - RNA, 21 nt, artificial
  Oligomer
ugccuagguaauccuucuugg

SEQ ID NO: 17067 - RNA, 21 nt, artificial
  Oligomer
aaacagcuugaacuggagccc

SEQ ID NO: 17068 - RNA, 21 nt, artificial
  Oligomer
uauagucuaucagcugguucc

SEQ ID NO: 17069 - RNA, 21 nt, artificial
  Oligomer
auguucuucaggauaguguac

SEQ ID NO: 17070 - RNA, 21 nt, artificial
  Oligomer
agaaaagugcaccaaauguac

SEQ ID NO: 17071 - RNA, 21 nt, artificial
  Oligomer
aaaagugcaccaaauguacag

SEQ ID NO: 17072 - RNA, 21 nt, artificial
  Oligomer
caaacuguaaugucucaguac

SEQ ID NO: 17073 - RNA, 21 nt, artificial
  Oligomer
uuccugaaacuccagguccuc

SEQ ID NO: 17074 - RNA, 21 nt, artificial
  Oligomer
caggcaguaguuuuucaccug

SEQ ID NO: 17075 - RNA, 21 nt, artificial
  Oligomer
caguaguuuuucaccuggccc

SEQ ID NO: 17076 - RNA, 21 nt, artificial
  Oligomer
caggcauccuucaugcugucu

SEQ ID NO: 17077 - RNA, 21 nt, artificial
  Oligomer
uagcucagcuuaguguguucc

SEQ ID NO: 17078 - RNA, 21 nt, artificial
  Oligomer
guuucuuagacaccauguccc

SEQ ID NO: 17079 - RNA, 21 nt, artificial
  Oligomer
ugagucuucaugacuaccgug

SEQ ID NO: 17080 - RNA, 21 nt, artificial
  Oligomer
uucaugacuaccguguacuug

SEQ ID NO: 17081 - RNA, 21 nt, artificial
  Oligomer
cuuuugucucaggcacaaacc

SEQ ID NO: 17082 - RNA, 21 nt, artificial
  Oligomer
uagguaauccuucuuggccag

SEQ ID NO: 17083 - RNA, 21 nt, artificial
  Oligomer
cucauauagcuucugcuucca

SEQ ID NO: 17084 - RNA, 21 nt, artificial
  Oligomer
uucugcuuccagacacacucc

SEQ ID NO: 17085 - RNA, 21 nt, artificial
  Oligomer
uccaucgccuugucgauuuug

SEQ ID NO: 17086 - RNA, 21 nt, artificial
  Oligomer
uugucgauuuuggaaugucug

SEQ ID NO: 17087 - RNA, 21 nt, artificial
  Oligomer
uuuuuuccauuccuccuucuu

SEQ ID NO: 17088 - RNA, 21 nt, artificial
  Oligomer
uucuuggcauacaugaaagca

SEQ ID NO: 17089 - RNA, 21 nt, artificial
  Oligomer
uuggcauacaugaaagcaaug

SEQ ID NO: 17090 - RNA, 21 nt, artificial
  Oligomer
gcaauguuauauaacaccuca

SEQ ID NO: 17091 - RNA, 21 nt, artificial
  Oligomer
auguuauauaacaccucacag

SEQ ID NO: 17092 - RNA, 21 nt, artificial
  Oligomer
uuauauaacaccucacaggca

SEQ ID NO: 17093 - RNA, 21 nt, artificial
  Oligomer
caggauaguguacaugcagcc

SEQ ID NO: 17094 - RNA, 21 nt, artificial
  Oligomer
aggauaguguacaugcagcca

SEQ ID NO: 17095 - RNA, 21 nt, artificial
  Oligomer
cagaaacaggaauauuuguac

SEQ ID NO: 17096 - RNA, 21 nt, artificial
  Oligomer
uuuauugugguaugacacaga

SEQ ID NO: 17097 - RNA, 21 nt, artificial
  Oligomer
uuacagugugaacacagcugg

SEQ ID NO: 17098 - RNA, 21 nt, artificial
  Oligomer
aaacuaggaggccaagagagc

SEQ ID NO: 17099 - RNA, 21 nt, artificial
  Oligomer
acucacaucauugucuaguag

SEQ ID NO: 17100 - RNA, 21 nt, artificial
  Oligomer
ucuuacaaacaaguaauaggg

SEQ ID NO: 17101 - RNA, 21 nt, artificial
  Oligomer
ugagagagaaaaggaaagaag

SEQ ID NO: 17102 - RNA, 21 nt, artificial
  Oligomer
ucauucaccuuugauaacacc

SEQ ID NO: 17103 - RNA, 21 nt, artificial
  Oligomer
ugucugguuauuagcaucagc

SEQ ID NO: 17104 - RNA, 21 nt, artificial
  Oligomer
uaagauaacuucucaguguug

SEQ ID NO: 17105 - RNA, 21 nt, artificial
  Oligomer
uuuggaacuaggaggagcugg

SEQ ID NO: 17106 - RNA, 21 nt, artificial
  Oligomer
aacaugaccguggcccaguua

SEQ ID NO: 17107 - RNA, 21 nt, artificial
  Oligomer
ccagagaaacugucuugaucc

SEQ ID NO: 17108 - RNA, 21 nt, artificial
  Oligomer
gucuugauccaccacagaugc

SEQ ID NO: 17109 - RNA, 21 nt, artificial
  Oligomer
auauagcuucugcuuccagac

SEQ ID NO: 17110 - RNA, 21 nt, artificial
  Oligomer
caaaugcaucaggaaaugucc

SEQ ID NO: 17111 - RNA, 21 nt, artificial
  Oligomer
cucguggccaaugcuaacugu

SEQ ID NO: 17112 - RNA, 21 nt, artificial
  Oligomer
guuauauaacaccucacaggc

SEQ ID NO: 17113 - RNA, 21 nt, artificial
  Oligomer
aucaaggcuucuuuaaggucu

SEQ ID NO: 17114 - RNA, 21 nt, artificial
  Oligomer
caucccucguuggaaguaagc

SEQ ID NO: 17115 - RNA, 21 nt, artificial
  Oligomer
aaguaagccacugccaagugc

SEQ ID NO: 17116 - RNA, 21 nt, artificial
  Oligomer
uuaaugcuucugguaaaggcc

SEQ ID NO: 17117 - RNA, 21 nt, artificial
  Oligomer
acaugcagccaauguugaagc

SEQ ID NO: 17118 - RNA, 21 nt, artificial
  Oligomer
ccaauguugaagcaaauccgg

SEQ ID NO: 17119 - RNA, 21 nt, artificial
  Oligomer
cuuaugaguaaccuauaaggu

SEQ ID NO: 17120 - RNA, 21 nt, artificial
  Oligomer
uuuuauugugguaugacacag

SEQ ID NO: 17121 - RNA, 21 nt, artificial
  Oligomer
guagguuaaauuuuaacaggg

SEQ ID NO: 17122 - RNA, 21 nt, artificial
  Oligomer
guugucugguuauuagcauca

SEQ ID NO: 17123 - RNA, 21 nt, artificial
  Oligomer
ucaucuggaaagccuugguca

SEQ ID NO: 17124 - RNA, 21 nt, artificial
  Oligomer
aaagccuuggucacccacugu

SEQ ID NO: 17125 - RNA, 21 nt, artificial
  Oligomer
ucacccacuguguucucacac

SEQ ID NO: 17126 - RNA, 21 nt, artificial
  Oligomer
agcuccaguuucuuagacacc

SEQ ID NO: 17127 - RNA, 21 nt, artificial
  Oligomer
cugagucuucaugacuaccgu

SEQ ID NO: 17128 - RNA, 21 nt, artificial
  Oligomer
aagauaacuucucaguguugc

SEQ ID NO: 17129 - RNA, 21 nt, artificial
  Oligomer
uucaagguaguugcagggaac

SEQ ID NO: 17130 - RNA, 21 nt, artificial
  Oligomer
aaacccagagaaacugucuug

SEQ ID NO: 17131 - RNA, 21 nt, artificial
  Oligomer
aaaugcaucaggaaauguccc

SEQ ID NO: 17132 - RNA, 21 nt, artificial
  Oligomer
aaugucugggcucagacuuca

SEQ ID NO: 17133 - RNA, 21 nt, artificial
  Oligomer
augucugggcucagacuucau

SEQ ID NO: 17134 - RNA, 21 nt, artificial
  Oligomer
ucuuauagucuaucagcuggu

SEQ ID NO: 17135 - RNA, 21 nt, artificial
  Oligomer
guaguagagcaucccucguug

SEQ ID NO: 17136 - RNA, 21 nt, artificial
  Oligomer
guaaugguucagaaacaggaa

SEQ ID NO: 17137 - RNA, 21 nt, artificial
  Oligomer
uugugguaugacacagaaaag

SEQ ID NO: 17138 - RNA, 21 nt, artificial
  Oligomer
uacucacaucauugucuagua

SEQ ID NO: 17139 - RNA, 21 nt, artificial
  Oligomer
uuguaguuugugaaacauccu

SEQ ID NO: 17140 - RNA, 21 nt, artificial
  Oligomer
aucuguaguugcgcagucuuc

SEQ ID NO: 17141 - RNA, 21 nt, artificial
  Oligomer
gcaguaguuuuucaccuggcc

SEQ ID NO: 17142 - RNA, 21 nt, artificial
  Oligomer
augacuaccguguacuuguag

SEQ ID NO: 17143 - RNA, 21 nt, artificial
  Oligomer
acuaccguguacuuguagugc

SEQ ID NO: 17144 - RNA, 21 nt, artificial
  Oligomer
cuuguagugcaccuugagugu

SEQ ID NO: 17145 - RNA, 21 nt, artificial
  Oligomer
uuguagugcaccuugagugug

SEQ ID NO: 17146 - RNA, 21 nt, artificial
  Oligomer
uuugucucaggcacaaaccca

SEQ ID NO: 17147 - RNA, 21 nt, artificial
  Oligomer
ugucgauuuuggaaugucugg

SEQ ID NO: 17148 - RNA, 21 nt, artificial
  Oligomer
uuuuggcaacugacucauaac

SEQ ID NO: 17149 - RNA, 21 nt, artificial
  Oligomer
aucuuauagucuaucagcugg

SEQ ID NO: 17150 - RNA, 21 nt, artificial
  Oligomer
aagcugaaucaaggcuucuuu

SEQ ID NO: 17151 - RNA, 21 nt, artificial
  Oligomer
aaggcuucuuuaaggucuuug

SEQ ID NO: 17152 - RNA, 21 nt, artificial
  Oligomer
caugcagccaauguugaagca

SEQ ID NO: 17153 - RNA, 21 nt, artificial
  Oligomer
caauguugaagcaaauccggg

SEQ ID NO: 17154 - RNA, 21 nt, artificial
  Oligomer
augaguaaccuauaagguuac

SEQ ID NO: 17155 - RNA, 21 nt, artificial
  Oligomer
caugauuagguagaaacuagg

SEQ ID NO: 17156 - RNA, 21 nt, artificial
  Oligomer
ugguaugacacagaaaagugc

SEQ ID NO: 17157 - RNA, 21 nt, artificial
  Oligomer
augacacagaaaagugcacca

SEQ ID NO: 17158 - RNA, 21 nt, artificial
  Oligomer
agaaacaggaucaguaccugg

SEQ ID NO: 17159 - RNA, 21 nt, artificial
  Oligomer
aacuguaaugucucaguacag

SEQ ID NO: 17160 - RNA, 21 nt, artificial
  Oligomer
aguuugugaaacauccuagac

SEQ ID NO: 17161 - RNA, 21 nt, artificial
  Oligomer
agccucauaacugaagagugc

SEQ ID NO: 17162 - RNA, 21 nt, artificial
  Oligomer
uuucugggccagaugaguaga

SEQ ID NO: 17163 - RNA, 21 nt, artificial
  Oligomer
uuuccuuggguucaucuggaa

SEQ ID NO: 17164 - RNA, 21 nt, artificial
  Oligomer
cuguguucucacaccacagag

SEQ ID NO: 17165 - RNA, 21 nt, artificial
  Oligomer
uucucacaccacagagucagg

SEQ ID NO: 17166 - RNA, 21 nt, artificial
  Oligomer
uucaugcugucuucugaaagg

SEQ ID NO: 17167 - RNA, 21 nt, artificial
  Oligomer
auagcucagcuuaguguguuc

SEQ ID NO: 17168 - RNA, 21 nt, artificial
  Oligomer
uuuugucucaggcacaaaccc

SEQ ID NO: 17169 - RNA, 21 nt, artificial
  Oligomer
ucaguguugcaaaugcaucag

SEQ ID NO: 17170 - RNA, 21 nt, artificial
  Oligomer
aaauagcacacggugagccuc

SEQ ID NO: 17171 - RNA, 21 nt, artificial
  Oligomer
gccuagguaauccuucuuggc

SEQ ID NO: 17172 - RNA, 21 nt, artificial
  Oligomer
ucgauuuuggaaugucugggc

SEQ ID NO: 17173 - RNA, 21 nt, artificial
  Oligomer
auuuuggaaugucugggcuca

SEQ ID NO: 17174 - RNA, 21 nt, artificial
  Oligomer
uucaugcucguggccaaugcu

SEQ ID NO: 17175 - RNA, 21 nt, artificial
  Oligomer
cuucuuggcauacaugaaagc

SEQ ID NO: 17176 - RNA, 21 nt, artificial
  Oligomer
uuuggcaacugacucauaacc

SEQ ID NO: 17177 - RNA, 21 nt, artificial
  Oligomer
auaacaccucacaggcaaaca

SEQ ID NO: 17178 - RNA, 21 nt, artificial
  Oligomer
ucgaagcugaaucaaggcuuc

SEQ ID NO: 17179 - RNA, 21 nt, artificial
  Oligomer
gauagccaaaucauauuucuc

SEQ ID NO: 17180 - RNA, 21 nt, artificial
  Oligomer
uuucucugucugguaguagag

SEQ ID NO: 17181 - RNA, 21 nt, artificial
  Oligomer
aucccucguuggaaguaagcc

SEQ ID NO: 17182 - RNA, 21 nt, artificial
  Oligomer
uaagccacugccaagugcuug

SEQ ID NO: 17183 - RNA, 21 nt, artificial
  Oligomer
cuucugguaaaggccuucucu

SEQ ID NO: 17184 - RNA, 21 nt, artificial
  Oligomer
augcagccaauguugaagcaa

SEQ ID NO: 17185 - RNA, 21 nt, artificial
  Oligomer
cuauaagguuacuucaagccu

SEQ ID NO: 17186 - RNA, 21 nt, artificial
  Oligomer
aagagccaauuacaguaaugg

SEQ ID NO: 17187 - RNA, 21 nt, artificial
  Oligomer
ugucuuguuuuuguaagaugc

SEQ ID NO: 17188 - RNA, 21 nt, artificial
  Oligomer
gugguaugacacagaaaagug

SEQ ID NO: 17189 - RNA, 21 nt, artificial
  Oligomer
augaauguuuacagugugaac

SEQ ID NO: 17190 - RNA, 21 nt, artificial
  Oligomer
guuuacagugugaacacagcu

SEQ ID NO: 17191 - RNA, 21 nt, artificial
  Oligomer
uagguagaaacuaggaggcca

SEQ ID NO: 17192 - RNA, 21 nt, artificial
  Oligomer
uagcacucagagcaagaaaca

SEQ ID NO: 17193 - RNA, 21 nt, artificial
  Oligomer
aaacaggaucaguaccuggaa

SEQ ID NO: 17194 - RNA, 21 nt, artificial
  Oligomer
gaucaguaccuggaagacucu

SEQ ID NO: 17195 - RNA, 21 nt, artificial
  Oligomer
uuccaaacuguaaugucucag

SEQ ID NO: 17196 - RNA, 21 nt, artificial
  Oligomer
cuuacaaacaaguaauagggc

SEQ ID NO: 17197 - RNA, 21 nt, artificial
  Oligomer
uaguuugugaaacauccuaga

SEQ ID NO: 17198 - RNA, 21 nt, artificial
  Oligomer
gauaacaccaggauuauaucc

SEQ ID NO: 17199 - RNA, 21 nt, artificial
  Oligomer
auaacaccaggauuauauccc

SEQ ID NO: 17200 - RNA, 21 nt, artificial
  Oligomer
cucauaacugaagagugccuc

SEQ ID NO: 17201 - RNA, 21 nt, artificial
  Oligomer
uagcaucagcuuuuucacuuu

SEQ ID NO: 17202 - RNA, 21 nt, artificial
  Oligomer
agcaucagcuuuuucacuuuc

SEQ ID NO: 17203 - RNA, 21 nt, artificial
  Oligomer
gcaucagcuuuuucacuuucc

SEQ ID NO: 17204 - RNA, 21 nt, artificial
  Oligomer
guucaucuggaaagccuuggu

SEQ ID NO: 17205 - RNA, 21 nt, artificial
  Oligomer
aucuggaaagccuuggucacc

SEQ ID NO: 17206 - RNA, 21 nt, artificial
  Oligomer
cuuuggaacuaggaggagcug

SEQ ID NO: 17207 - RNA, 21 nt, artificial
  Oligomer
agauaacuucucaguguugca

SEQ ID NO: 17208 - RNA, 21 nt, artificial
  Oligomer
cuucucaguguugcaaaugca

SEQ ID NO: 17209 - RNA, 21 nt, artificial
  Oligomer
uucucaguguugcaaaugcau

SEQ ID NO: 17210 - RNA, 21 nt, artificial
  Oligomer
gagcucuucuuuugucucagg

SEQ ID NO: 17211 - RNA, 21 nt, artificial
  Oligomer
gcaaacccagagaaacugucu

SEQ ID NO: 17212 - RNA, 21 nt, artificial
  Oligomer
agccacuugucucucauuugg

SEQ ID NO: 17213 - RNA, 21 nt, artificial
  Oligomer
gucgauuuuggaaugucuggg

SEQ ID NO: 17214 - RNA, 21 nt, artificial
  Oligomer
aaugcuaacuguucuucagcu

SEQ ID NO: 17215 - RNA, 21 nt, artificial
  Oligomer
aacuguucuucagcuuuuuuc

SEQ ID NO: 17216 - RNA, 21 nt, artificial
  Oligomer
acuguucuucagcuuuuuucc

SEQ ID NO: 17217 - RNA, 21 nt, artificial
  Oligomer
aucauauuucucugucuggua

SEQ ID NO: 17218 - RNA, 21 nt, artificial
  Oligomer
guuggaaguaagccacugcca

SEQ ID NO: 17219 - RNA, 21 nt, artificial
  Oligomer
augcuucugguaaaggccuuc

SEQ ID NO: 17220 - RNA, 21 nt, artificial
  Oligomer
aauguugaagcaaauccggga

SEQ ID NO: 17221 - RNA, 21 nt, artificial
  Oligomer
cuucauuccagaggcugaugg

SEQ ID NO: 17222 - RNA, 21 nt, artificial
  Oligomer
uccaccagggacaugauuagg

SEQ ID NO: 17223 - RNA, 21 nt, artificial
  Oligomer
accagggacaugauuagguag

SEQ ID NO: 17224 - RNA, 21 nt, artificial
  Oligomer
aggaauauuuguacuuacucc

SEQ ID NO: 17225 - RNA, 21 nt, artificial
  Oligomer
gacuugggugucuuguuuuug

SEQ ID NO: 17226 - RNA, 21 nt, artificial
  Oligomer
uaguuaacacuuccaaacugu

SEQ ID NO: 17227 - RNA, 21 nt, artificial
  Oligomer
caggagacagagagaagacag

SEQ ID NO: 17228 - RNA, 21 nt, artificial
  Oligomer
guaguuugugaaacauccuag

SEQ ID NO: 17229 - RNA, 21 nt, artificial
  Oligomer
gccucauaacugaagagugcc

SEQ ID NO: 17230 - RNA, 21 nt, artificial
  Oligomer
guguacuuguagugcaccuug

SEQ ID NO: 17231 - RNA, 21 nt, artificial
  Oligomer
augaccguggcccaguuauca

SEQ ID NO: 17232 - RNA, 21 nt, artificial
  Oligomer
agagaaacugucuugauccac

SEQ ID NO: 17233 - RNA, 21 nt, artificial
  Oligomer
ugcaaaugcaucaggaaaugu

SEQ ID NO: 17234 - RNA, 21 nt, artificial
  Oligomer
cuugucgauuuuggaaugucu

SEQ ID NO: 17235 - RNA, 21 nt, artificial
  Oligomer
caaugcuaacuguucuucagc

SEQ ID NO: 17236 - RNA, 21 nt, artificial
  Oligomer
augcuaacuguucuucagcuu

SEQ ID NO: 17237 - RNA, 21 nt, artificial
  Oligomer
uaacaccucacaggcaaacag

SEQ ID NO: 17238 - RNA, 21 nt, artificial
  Oligomer
ucacaggcaaacagcuugaac

SEQ ID NO: 17239 - RNA, 21 nt, artificial
  Oligomer
caggaucuuauagucuaucag

SEQ ID NO: 17240 - RNA, 21 nt, artificial
  Oligomer
aggaucuuauagucuaucagc

SEQ ID NO: 17241 - RNA, 21 nt, artificial
  Oligomer
ucuuuaaggucuuugauagcc

SEQ ID NO: 17242 - RNA, 21 nt, artificial
  Oligomer
ugucugguaguagagcauccc

SEQ ID NO: 17243 - RNA, 21 nt, artificial
  Oligomer
gaaguaagccacugccaagug

SEQ ID NO: 17244 - RNA, 21 nt, artificial
  Oligomer
ccuuaugaguaaccuauaagg

SEQ ID NO: 17245 - RNA, 21 nt, artificial
  Oligomer
guaaccuauaagguuacuuca

SEQ ID NO: 17246 - RNA, 21 nt, artificial
  Oligomer
auaagguuacuucaagccuua

SEQ ID NO: 17247 - RNA, 21 nt, artificial
  Oligomer
guucagaaacaggaauauuug

SEQ ID NO: 17248 - RNA, 21 nt, artificial
  Oligomer
auguuuacagugugaacacag

SEQ ID NO: 17249 - RNA, 21 nt, artificial
  Oligomer
aagaaacaggaucaguaccug

SEQ ID NO: 17250 - RNA, 21 nt, artificial
  Oligomer
uauacagcagaagggugcuaa

SEQ ID NO: 17251 - RNA, 21 nt, artificial
  Oligomer
caaacaaguaauagggcuuca

SEQ ID NO: 17252 - RNA, 21 nt, artificial
  Oligomer
aaguaauagggcuucauuuuc

SEQ ID NO: 17253 - RNA, 21 nt, artificial
  Oligomer
uucagcuuuguaguuugugaa

SEQ ID NO: 17254 - RNA, 21 nt, artificial
  Oligomer
auccuagacuucucuccgagu

SEQ ID NO: 17255 - RNA, 21 nt, artificial
  Oligomer
caagguguucacuuucugggc

SEQ ID NO: 17256 - RNA, 21 nt, artificial
  Oligomer
uuggguagccucauaacugaa

SEQ ID NO: 17257 - RNA, 21 nt, artificial
  Oligomer
uaccguguacuuguagugcac

SEQ ID NO: 17258 - RNA, 21 nt, artificial
  Oligomer
acugagcuucacuuccuuagg

SEQ ID NO: 17259 - RNA, 21 nt, artificial
  Oligomer
cugagcuucacuuccuuaggc

SEQ ID NO: 17260 - RNA, 21 nt, artificial
  Oligomer
ugagcuucacuuccuuaggcu

SEQ ID NO: 17261 - RNA, 21 nt, artificial
  Oligomer
aaacccaaauagcacacggug

SEQ ID NO: 17262 - RNA, 21 nt, artificial
  Oligomer
aacugucuugauccaccacag

SEQ ID NO: 17263 - RNA, 21 nt, artificial
  Oligomer
uuggucgaaacagcuugccca

SEQ ID NO: 17264 - RNA, 21 nt, artificial
  Oligomer
agcuucugcuuccagacacac

SEQ ID NO: 17265 - RNA, 21 nt, artificial
  Oligomer
caucgccuugucgauuuugga

SEQ ID NO: 17266 - RNA, 21 nt, artificial
  Oligomer
uuuuggaaugucugggcucag

SEQ ID NO: 17267 - RNA, 21 nt, artificial
  Oligomer
gaucuuauagucuaucagcug

SEQ ID NO: 17268 - RNA, 21 nt, artificial
  Oligomer
uagucuaucagcugguucccu

SEQ ID NO: 17269 - RNA, 21 nt, artificial
  Oligomer
aggcuucuuuaaggucuuuga

SEQ ID NO: 17270 - RNA, 21 nt, artificial
  Oligomer
aguaagccacugccaagugcu

SEQ ID NO: 17271 - RNA, 21 nt, artificial
  Oligomer
guaaaggccuucucugcuuca

SEQ ID NO: 17272 - RNA, 21 nt, artificial
  Oligomer
aaaggccuucucugcuucagu

SEQ ID NO: 17273 - RNA, 21 nt, artificial
  Oligomer
auguugaagcaaauccgggag

SEQ ID NO: 17274 - RNA, 21 nt, artificial
  Oligomer
aguaaccuauaagguuacuuc

SEQ ID NO: 17275 - RNA, 21 nt, artificial
  Oligomer
ccuauaagguuacuucaagcc

SEQ ID NO: 17276 - RNA, 21 nt, artificial
  Oligomer
uaagguuacuucaagccuuaa

SEQ ID NO: 17277 - RNA, 21 nt, artificial
  Oligomer
gguaugacacagaaaagugca

SEQ ID NO: 17278 - RNA, 21 nt, artificial
  Oligomer
gugcaccaaauguacagcuug

SEQ ID NO: 17279 - RNA, 21 nt, artificial
  Oligomer
gaauguuuacagugugaacac

SEQ ID NO: 17280 - RNA, 21 nt, artificial
  Oligomer
aacuaggaggccaagagagcu

SEQ ID NO: 17281 - RNA, 21 nt, artificial
  Oligomer
aaacaaguaauagggcuucau

SEQ ID NO: 17282 - RNA, 21 nt, artificial
  Oligomer
acuucucuccgagugcuuucc

SEQ ID NO: 17283 - RNA, 21 nt, artificial
  Oligomer
uccaaaucuguaguugcgcag

SEQ ID NO: 17284 - RNA, 21 nt, artificial
  Oligomer
aagguguucacuuucugggcc

SEQ ID NO: 17285 - RNA, 21 nt, artificial
  Oligomer
guacuuguagugcaccuugag

SEQ ID NO: 17286 - RNA, 21 nt, artificial
  Oligomer
augggaacacugagcuucacu

SEQ ID NO: 17287 - RNA, 21 nt, artificial
  Oligomer
aacugguucaagguaguugca

SEQ ID NO: 17288 - RNA, 21 nt, artificial
  Oligomer
agguaguugcagggaacaagc

SEQ ID NO: 17289 - RNA, 21 nt, artificial
  Oligomer
caaauagcacacggugagccu

SEQ ID NO: 17290 - RNA, 21 nt, artificial
  Oligomer
agguaauccuucuuggccagc

SEQ ID NO: 17291 - RNA, 21 nt, artificial
  Oligomer
uugcaaaugcaucaggaaaug

SEQ ID NO: 17292 - RNA, 21 nt, artificial
  Oligomer
cacuggcucauauagcuucug

SEQ ID NO: 17293 - RNA, 21 nt, artificial
  Oligomer
gauuuuggaaugucugggcuc

SEQ ID NO: 17294 - RNA, 21 nt, artificial
  Oligomer
uucucugucugguaguagagc

SEQ ID NO: 17295 - RNA, 21 nt, artificial
  Oligomer
gucucgguuaaugcuucuggu

SEQ ID NO: 17296 - RNA, 21 nt, artificial
  Oligomer
accuauaagguuacuucaagc

SEQ ID NO: 17297 - RNA, 21 nt, artificial
  Oligomer
uagcuagcacucagagcaaga

SEQ ID NO: 17298 - RNA, 21 nt, artificial
  Oligomer
cccaagguguucacuuucugg

SEQ ID NO: 17299 - RNA, 21 nt, artificial
  Oligomer
ucaccuuugauaacaccagga

SEQ ID NO: 17300 - RNA, 21 nt, artificial
  Oligomer
aaacuccagguccucugguug

SEQ ID NO: 17301 - RNA, 21 nt, artificial
  Oligomer
accguguacuuguagugcacc

SEQ ID NO: 17302 - RNA, 21 nt, artificial
  Oligomer
caacugguucaagguaguugc

SEQ ID NO: 17303 - RNA, 21 nt, artificial
  Oligomer
uuggaaugucugggcucagac

SEQ ID NO: 17304 - RNA, 21 nt, artificial
  Oligomer
caggcaaacagcuugaacugg

SEQ ID NO: 17305 - RNA, 21 nt, artificial
  Oligomer
cugucugguaguagagcaucc

SEQ ID NO: 17306 - RNA, 21 nt, artificial
  Oligomer
gucugguaguagagcaucccu

SEQ ID NO: 17307 - RNA, 21 nt, artificial
  Oligomer
guuaaugcuucugguaaaggc

SEQ ID NO: 17308 - RNA, 21 nt, artificial
  Oligomer
uaaugcuucugguaaaggccu

SEQ ID NO: 17309 - RNA, 21 nt, artificial
  Oligomer
agccaauuacaguaaugguuc

SEQ ID NO: 17310 - RNA, 21 nt, artificial
  Oligomer
gucuuguuuuuguaagaugcu

SEQ ID NO: 17311 - RNA, 21 nt, artificial
  Oligomer
ugaacacagcuggcuagcuag

SEQ ID NO: 17312 - RNA, 21 nt, artificial
  Oligomer
ugggccagaugaguagaaugg

SEQ ID NO: 17313 - RNA, 21 nt, artificial
  Oligomer
uaauccuucuuggccagcuga

SEQ ID NO: 17314 - RNA, 21 nt, artificial
  Oligomer
acaggcaaacagcuugaacug

SEQ ID NO: 17315 - RNA, 21 nt, artificial
  Oligomer
gguuacuucaagccuuaagag

SEQ ID NO: 17316 - RNA, 21 nt, artificial
  Oligomer
agagccaauuacaguaauggu

SEQ ID NO: 17317 - RNA, 21 nt, artificial
  Oligomer
caguaaugguucagaaacagg

SEQ ID NO: 17318 - RNA, 21 nt, artificial
  Oligomer
uacuuacuccuugggccugga

SEQ ID NO: 17319 - RNA, 21 nt, artificial
  Oligomer
aucaguaccuggaagacucuc

SEQ ID NO: 17320 - RNA, 21 nt, artificial
  Oligomer
uuacaaacaaguaauagggcu

SEQ ID NO: 17321 - RNA, 21 nt, artificial
  Oligomer
acaaacaaguaauagggcuuc

SEQ ID NO: 17322 - RNA, 21 nt, artificial
  Oligomer
gacuaccguguacuuguagug

SEQ ID NO: 17323 - RNA, 21 nt, artificial
  Oligomer
uggcccaguuaucauugcccu

SEQ ID NO: 17324 - RNA, 21 nt, artificial
  Oligomer
aacccaaauagcacacgguga

SEQ ID NO: 17325 - RNA, 21 nt, artificial
  Oligomer
uuuaaggucuuugauagccaa

SEQ ID NO: 17326 - RNA, 21 nt, artificial
  Oligomer
caguauacagcagaagggugc

SEQ ID NO: 17327 - RNA, 21 nt, artificial
  Oligomer
aguauacagcagaagggugcu

SEQ ID NO: 17328 - RNA, 21 nt, artificial
  Oligomer
cuguucuucagcuuuuuucca

SEQ ID NO: 17329 - RNA, 21 nt, artificial
  Oligomer
caaacagcuugaacuggagcc

SEQ ID NO: 17330 - RNA, 21 nt, artificial
  Oligomer
aaggucuuugauagccaaauc

SEQ ID NO: 17331 - RNA, 21 nt, artificial
  Oligomer
aggccuucucugcuucaguca

SEQ ID NO: 17332 - RNA, 21 nt, artificial
  Oligomer
acaguaaugguucagaaacag

SEQ ID NO: 17333 - RNA, 21 nt, artificial
  Oligomer
guguucucacaccacagaguc

SEQ ID NO: 17334 - RNA, 21 nt, artificial
  Oligomer
aacaccucacaggcaaacagc

SEQ ID NO: 17335 - RNA, 21 nt, artificial
  Oligomer
cucauaacccuaccaugagag

SEQ ID NO: 17336 - RNA, 21 nt, artificial
  Oligomer
uaguguacaugcagccaaugu

SEQ ID NO: 17337 - RNA, 21 nt, artificial
  Oligomer
uacaaacaaguaauagggcuu

SEQ ID NO: 17338 - RNA, 21 nt, artificial
  Oligomer
uuuccauuccuccuucuuggc

SEQ ID NO: 17339 - RNA, 21 nt, artificial
  Oligomer
caauguucccuggcaugaccu

SEQ ID NO: 17340 - RNA, 21 nt, artificial
  Oligomer
aacacagcuggcuagcuagca

SEQ ID NO: 17341 - RNA, 21 nt, artificial
  Oligomer
uuggcugccuuucuuaagcug

SEQ ID NO: 17342 - RNA, 21 nt, artificial
  Oligomer
uuccauuccuccuucuuggca

SEQ ID NO: 17343 - RNA, 21 nt, artificial
  Oligomer
cuuuaaggucuuugauagcca

SEQ ID NO: 17344 - RNA, 21 nt, artificial
  Oligomer
aggucuuugauagccaaauca

SEQ ID NO: 17345 - RNA, 21 nt, artificial
  Oligomer
ugcuucugguaaaggccuucu

SEQ ID NO: 17346 - RNA, 21 nt, artificial
  Oligomer
uucugguaaaggccuucucug

SEQ ID NO: 17347 - RNA, 21 nt, artificial
  Oligomer
ucugguaaaggccuucucugc

SEQ ID NO: 17348 - RNA, 21 nt, artificial
  Oligomer
augguucagaaacaggaauau

SEQ ID NO: 17349 - RNA, 21 nt, artificial
  Oligomer
cuuggcugccuuucuuaagcu

SEQ ID NO: 17350 - RNA, 21 nt, artificial
  Oligomer
uggcugccuuucuuaagcuga

SEQ ID NO: 17351 - RNA, 21 nt, artificial
  Oligomer
aauguucccuggcaugaccug

SEQ ID NO: 17352 - RNA, 21 nt, artificial
  Oligomer
cuuguuuuuguaagaugcuag
